United States Patent Application Publication US 2007/0054278 A1 - sequence listing, part 17

SEQ ID NO: 93451 - DNA, 64878 bp, Homo sapiens
ctaggagaaaggtaaatgaatattggtgttcccatgcaatgaaataccaagcagttgcttttgcaaacaaggtagaccactggttttaaacattggataattctctcccctaggggatatttggcaatgactacagatactttggttgccaaaacttggggagggattctactggcacctagtagagatagaggccagggaccctgctacacatacaatgcacaagaaagcagccacaacaaataatgatcagaaccataatgacaatagtgccgcagtaagaaaccctagggacaactaaatacaagtaaagtggaatgatcatgaagacaagaccagaaggaccagaatgagctctaatttgttagagaaaaagcgtgtcagagtgagaactagcacacacaggagtgagcagacaaagagattcatacatcctggccgggtgcgggggctcacgcctgtaatcccagcactctgggaggccgaggagggcggatcacgaggtcaggagatcgagaccatcctggataacatggtgaaaccccgtctctactaaaaatacaaaaaattagccgggcgtggttgcaggcgcctgtagtcccagctactcgggaggctgaggcaggagaatggcgggaacccaggaggcggagctcgcagtgagccgagattttgccactgcactccagcctgggcgacagagcgagactctgtctcaaaaaaaaaaaaagaaagattcatacatccagacagataagcatacatattctctgaaagactgtaccaaaaaatgaaggaatcttgaggatgggagaattattttttgccttttcttgaacaaaactttcatttgaatttttactatgtgtatgcattacttttaaatgttcaattttttaatgctctattcagaatacttttacattttgacatccatgttcttaagggaaactggtctataattttcttttttgtagtatcctcttcaaatttcaggttaagtggcttcacaaaatgaactgggtaccttttcatctttaatagcctggaaaaatggaacgcagaaattatctagtctttacatttagtgaaaggagtaattatgaaggatttcggagggcaaatttaagtctcactaccttttagtcaaaacccgacttccaggtataacctccataaacactggtactacagagcaagtagatacagagaaaattgttcatgaggtactgtatacaatagtaaaaaaaaattaggccaggtgcagtggctcatgcctgtaatcccagcactttgggaggacgaggtgggtagatcacctgaggtcaggagttcgagaccagcctggccaacatggtaaagccccgtctctactaaaaatacaaatattagccgggtgtggtggcacgtgcacgtaatcccagctacttggaaggctgagataggagaatcgcttgaacctgggaggcagaggttgcagtgagccgagatcacgccactgcaccgcagcctgggcgacaagagcaaaactccatttaaaaaaaaaaaaaaaaggccaggcacggtggctcacacctgtaatcccagcactttgggaggctgaggtggacagatcacctgaggtcgggagttcgagaccagcctgaccaacatggagaaacctcatctctagtaaaaatacaaaattggctgggcatggtggcacatgcctgtaatcccaggtactcggttggctgaggcaggaaaatcgcttgaacctggaaggcggaggttgcagtgagccgatatcgcaccattgcactctagcctgggcaacaagagtgaaactccgtcacaaaaaaaaaaaaaaaagaaaaagaaattaaaaacctaaatatctgtgaatagaaaaatagttacatgatacatccatactatgaaataggaattaaaacaatctttatatattgacaaggaacaccacccaggatataatcaggttcagaaagcaagatgggtatgggaatatgatgccatttgtgtaaaagcataaaaaaaatatatacgtgtacgtttttagttcattaaactgacataaatgcatctaccccacagtttcacccaactgttaacagtggacatctctaaggaggaacgtggtactggggggagaagaaatagaaactttattggctactagtttcttctatgtacattaaaacattatacacaaacttattctcttaaacacagtaaaaaagaccaagcgatctagaagtgaagaaagaggaaaaagcaaggtgaatctatgtatttaaacaattcttctctgagaagaagaagaaaagatgaggtacagtttctggaagaacaagtagagagaggtatctttttgtttttcctctctcctggtgaggggaaggattagagaaaccagaggctgaggacaagttgaacagaaaacagccagagaagaggggataattggtattttcaagtttattatatagattccaaactttgcctcaatttcactggaaaaaaagtaggggtacattagaactcacctgggacatggccatcttgttgtgctcctgcaaaggatggagatctacaaatacagaattagaagggttgagttcagtgggtatagacataagatcatcatcaccaccctaataataattacctttgcaccctgggaagaatcatctaaaaataaggcctggtagcttcagcctattccatgggacgctactaagatcatgtgggttttgcacatgaaactttgtctcccttactggacagatgtatgacttgtgtccaaagccatctacatgtcagaaaccagtaacaacttaacatctcctttatctcaagagttctattcctagcacaaagatgcaaaatgttcaccattgtcatttccactatgaaaaatctgcctataatccctgcatgcggggggcgctgaaggaggattgattgaggccaggagttcaagaccagcctagacaatatagcaaggccttgtctctacaaaaccgaaaattaaaaaaattagctggcgtggtggtgcatgcctgtagtcccagctactcaaaaggctgagatgggagggtctcttgagcccaggagtgcgaggttagtgagccatgatcacgtccctgcactccagcctgtgtgacaacgtcagagcctggctcaaaaataaacaaaaaaataaaaaaatcttcgaagcaactaaatgtgcagcaaaggggacttagtaaaaaaatatgacacgtgcaaaacaagcatactacacaggctttaaagatggtttctgaactttgttttcagttcctgggtgtttaaagggaggttccaacaaagcaactgcagtgtaatctcatttttgttaagcaatatgtacaaatatgaagtctcaaacagcatttattcttttttttgtttttttttgagatgcagttttgctcttgttgcccaggctggagtgcagtggcatgatctcagctcactgcaacctccacctcccgggttcaagcgattctcctgcctcagcatcccaagtagctggaattataggcatgcaccaacatgcccagctaattatttttgtatttttagtagagacggggtttcatcatgttggtcaggctggcctcaaactcctgacctcaggtgatccatccgcctcagcctcccaaagtgctgggattacaggcatgagccaccgcgcctgacctcaaacagcatttattcaaatgctgacattggttacattgttcggtgattttaattttcttgtttatttgcatttttgacaaggaatattaattactaatgaaacaaaaattaaaatttattaaaaaatcacttcttatcaaacagagccctagaggtgaaaagacactctccaagtgtgtatgagtaagatctcttcatgtggtttggaggaaggagcccaaccagggctcaaagggccgcagggaaggagaggtgtggggctgggtgggtaacagccaagcactgtcagttctgtgaggggctgaaaaccactgtgcctgcttccctgcatccacctctctaactggccacctaccctgctcccaccccaccacttcctcctttcccatgatttgcattttgattgccatgctcctccttctttggcagattttcaaaagaaagttccagcaaggagattctgtgcagagtaaccatttcatactgcagcaatcactgtgataccatcaggacaacagggttcagctccgtgtagcttagcaggtcatgtcccctggcccactttcattaagcattgaaataaggcagcagagctggatgacagcatacctagagactactctgaaattctataaactaaaaatatattttctgcactttggtcaggatgaacggacactcagcatttcccctggaagcaggtgcctggttgatggtgtggggctgactcaaattcagaaatagccaatggcaagagaaggaagcatgggggtgcacaaataggtgtgctaggagaggccaatcctctgtggctggctgtgatccttcccagcctcatcccgcctttgcaggtactacagcagggcacctgcccccatgggggacatccatgcctccatccacctgtgactttcacctgtccctcctccagcaggaatcaaactgcactgtcacatggtcctccatggcacctggaagtagagccagctttgctctgtctcagctgaagtgagggacaaaggccactacgggtccagctcttctaggacctgctgtcccgtgagcctcctttgctctgaggatctgggtctgggctcttgctgaggcttctcctccaactcgcctcagctcagcgtacctctcttgtgtccaaggcggcaggaccaagggattcagagacaaacacaccccagttggggccatcactatagcactagatctctgcctgtgacccagggaactcacctcttcctggggcctcagcctaagtcttctgcgactaagtggggaagccgaggcacagataaactggagtctgaaatcggtgagcagtggtctcaggtctgcactctgaccctggaaacacaatgaccacaggagattcaattagcaacacctatgctcccttccatgcagtgaagttgagtgaaacccaaaggtttttacccaacagaagagggacaacccctcattctagttttaagagttaacattcatgcacagctcaattatcctcagtgagcgaaaccctgccttcctgagtccgggctttggaatcaactgactggctgctgtgccacttttattcactgaagaaatgattgccttccatgagccggttctccgtgttgcaaatccatcagtgaacaaaatctcaaattcccagctccagatttctagtctggaggaagagacacactggaaacaataaacatgataaacaaagtacaggaaaagaaaaagaaaaaggattcctcgggtttgctacctacgggactttggacaggttgccaagccacactgtaccgttttctctctataacatgaaaataatcatcgtaacacctcacagggctcctgctaatgtgaaacatttgcaagagtgtctggcagttaccaccgggtgaggatacaagcgctgagtgactcaatcaattagtcactcgctggccccgaacctcgcccccaacactcacgcccaccgcctgtgtcactcaatccccacaaggacgctcacccgtggccccatgaccccacggccccgtaaactcccgtcattcctcccgtccccccttcccccgatcaaaaccatcaccacctcaccctcccgcttacttcactgccgacagcctgaaacctcaggggcggatgacaacagccagtgtgaacgaagcgccaccctccgggtcagccgagcatttccgcttcccacagccccctgggaacgtgaagtcaaagcaatgcgcacgcgcagtggctttgaaggcggggcaacaaagcctgtggccgatgtggcgctcctcggcccgcgcttcagtggttatgacagtgttcgctctaaggggagaaggaatgtgtgaccatttccaacggtaagtcgtacaaaaggtccggggaggcgtacctgggcggcgagaggcgagagaactccgcgcgggctttccagtgcccaggcccctgccggctccgaagccgaaatcccttcttccacttcgttctcttgcagtggacgtggggtgttcccacccctctgtccccaaggccactgtttctgtcttccgctcctaggaataggaaaaagagtcgcgcctctggcatctgtggcagctccagagcgcggccctctagggtccaggcaggccacatggagcggggccctaggcctggctcagagcgtcctaagagcaacaggtctggctcagtcggggaagtggcctggaagaggggctttggagccgggcttcagagccagcaacctcccgaagtgagggaagaaagcctcattctgattgttctctacccagtggtggggctccggttcctaggatcttagacaccctgggagaatctggattttactttttagcggagaggtgttttctctgagaatgccagccagtggcaacatggcccgctaaaaaggcctgtagtaaacttgaggaaagttttctgtttcctgtctgggtctgggagaaagagaacaagtgttgttctccatgcttactatgcctgcctggtcaccaagcgggcctctttgggtcaagtatgacagagtctccctcaggtacacagcaaacccttctgtgctagagccagctggtgccagacactgttcatagatgtgtccaagacatttgtgtaatctatcagacacgtatttaatttccatttgaacatgagtgtttttcctctttctctttctcctctcaggttaacttgcattccccagatagtttggatgagttacaacctaaatctgcaaactcaatacagccagaccctgggaagtgactctctccaagcctcctgtacaagtcccaggaaaagagcctgttttcccttggacatgtgagcagtgaattactgctcattcagaatttcatgtgtatgtgttactgatggccaggtttagagataccaacctatttatttctagaggagaggtgatttgataaccttttcagatatcactatcagtaggcagaaaagggttaatagtatgatagggttaatatgtcctgaggagagtaaagaaattgcaaactgcagaagcacctgatctgtggccctggccagcatctctccatatcctgattctgtaagatcaagtgtttatgcagaaagagaagggactgatgatttgaatgtgaccagatgcagggcatgcccttattgccatgccagcatttgctattcatgatgttagtattcaaaaatcaagaaacacccttcctgggccattggtgtctactaatccattggaagaaaagactggaatccaccacttactagcttcttgggcctcagtcccctcttttctgccatagctaaggaccacctaacctagatggctgttgttattgttcaaagggacatctttagagcctcaagcccaggaatagcccgtggcaggcacctggtaaatgttagttttcattgtcctatcccaacactatgaaacatgcagcactctctgcaactgcccctgtggatttccataggcaggagagtatccagtgttgagtggagctggtattctcagaaacgaagcccctttcctcattttgcgccaatctcttcagtcatttttaccctagtagtataatgctttgtcaaagtcactgtcatctgatgttaacagttgttttcgccagatgacttttcaaaaggtaacttcaccataataccggttaatgtgataaaaacactgcatgtagccaattttttttttttttgagatggagttattggctcttgttgcccaggctagagtgcagcggcgtgatcttggctcactgcaacctccatctcgtgggttcaggtaattctcctgcctcagcctcccgagtggctgggattacaggcacacgccaccatgcccagctaatttttttgtatttttagtagagtcggggtttcactatatgttggccaggctggtctcgaactcctgacctcaggtgatccgcctgcctcagccttccaaagtgctggggttacaggtgtgagccactgcgcccagccaaatattttcttatttatttatttattttagagacaggatgccattatgttgcctagtttggaatgcagtgtctatttagaggcgtgatcatggcatactatagcctcggctcaaaggaccctggtctcaaaggaccctgccaccttagcctcctgagtagctgggacaagtgtgcgccaccacacctggctaattttttaaattttttgtagagatagtgtctcgctatgttgcccacgctggtctggaattcctggactcaaggcctcttcctgccctcagacttccaaagtgttaggattacagggtgagtcaccacgcccagccagtgtgaattttctaatgctgagtaagttgtgatccagaagtaaatgtatctgcaagctgatttaaattgtagattttctcttcattgcatattttctgatgttgaataaagtctgagtattaactaaagtttttgcttcttaaatatgtaagaattgtcctcaaaatctctattcttgagcacagtagtaaaaatatttttacatacattgtatttcaagggttctgcataagcaaccttgttttattgtgacaatttatttgggaattgtatcaaatatataatactgagatgttctcattccttttgtgaaaatacttttgtttaaaaaccactgccttcaaatgaaaaccactaggtttgttatgcttgcctcatcttttctcggtgtttttctttcattttttaaaaatacatgtctttcttttttatacctaaaacagtgggtttttaaaatgtgatatgtgtatgcgttgtataatggttaccacaatcaactaatacatccatcaccatccatactgtaccttagatctgcagaacttgttcatcgtagaatgtttttaccttttaggtcagacgtggtggctcacgtctgtaatccttgcactttgggaggccaaggtgggtggattgccagagctcgggagttcaagaccatcctgggaaacatagtgaaaccctgtctctactaaaaatacaaaaaattacccacgtgtggtggygcgcacctgtagtcccagttacttgggaggcagaggcacgagaatcatttgaacctgggaggcagaggttgcagtgagctgagatcgtgccgctgcactccagcctgggcgacagagcaagactctgtctccaaaaaaaaaaaagagtgtttttattttttgaccaacatctctccatttcctgtctcccactcctgcatccccagtccttggtaaccactgttctactctctgtttctatgagttcaactttttaagatttcacctttaagtgagataatgcagtatttgtcattctgtgtctagtttatttcatttagcatactatcttccaggttcctttttccctctgtgtctcaagtccacctttgcattgtcactttcttttctgaaatgaaaatggtattgtggctattacctagctagataccaactatgggctttgtagtatctggattagctgtaatgtacatgtgaatgatgactagtaaaatatatatagtaggaaaaatgatgcaattcaaaaagcaagaacacaagtataaataagcctaagaaggttggacatcatctatataaaggaaaataaactgtactccttagtgaagacttaatactgtaaaacctggccgggcacggtggctcacgcctgtaatcccagcactttgggaggccgaggcgggcagatcatgtcaggagatcgagaccaacctggctgacatggtgaaaccccgtctctactaaaaatataaaaaaattagccgggcatggtagcgggtgcctgtagtcccagctactcgggaggctgaggcaggagaatggcatgaacccaggaggcagagcttgcagtgagccgagatcacgccactgcactctagcctgggcaagagcgagactccgtctcaaaaaaaaaaaaaccgaaattgtccctaagcctaattgatagatttaaggcaatttaaccaatatgctaaatgggatcaggggcctatagtacaattatacttcattttaattggcagaaaaaatatatgaacaactaagagtatttggtggatagaggtaacatgggaagactcatcttacaagatattagagggcattataaactaaagtaaataatgtggcatagagcagaattagatcactgaaacaaaaaaatccagaatcagaatatatggaatgtggagtcctgataagtaagcaacaagaaggaaggggtcccaggtgagagagaacaattgttctatagatggctaattgcagacaacctgctggcacacatcctgttcccagataccttgttttgcatgtggcctttccagcacaaccttataaaacttaaaacctccagcccctgcctctcagacagcctcttctctgctgtgctgcccattgaacccttacaacgtatcttcaaactttctctgataaatctgcctttctttacctatgactgttttggcaaaattcctttactgtccacaacaccatccccactcagttgtacccaagacagggaagactaaatgtctgacgtttaccttaaaaagtatgaaaaaataagttgagaggggccaagcatggtggctcacgcctataatcccaacactttgggaggctgaggtgggaggatggcttgaacctaggagtttgagaccagcctgggcaacatagtaagacctcatcactaccaaaaaaaaaaaaaaaaatctgggcatggtggtgtgtgcctgtagtcccagctacttaggaagctaaggtgggagagtcacttgagcgccagagctttgaggctgcagtgaggcttgatcatgccactgcactccagcctgggcaacagggtgagaccctgctgcaaaaaaaaattattataaacctacttatgctaagttataatggttgacaaaaacgtcagtagaaggcagagttccaatgtatatccatgtatgtattgaaaattaaaggtgttttcagtttgtgaaaattgacaggattgatgtgatataaatctgtaaggaaaaaatcctggacccctacatattatatataatgacaaattccaagtggattaaaattaaatatgaaaaataataaaatatatacgggctgggtgtggtggctcacgcctataatcccagcactttgagaggccgaggcaggtggatcacgaggtcaggagattgagaccaacctggccaacatggtgaacccctgtctctactaaaaatacaaaaattagctgggcgtggtggcacctgcctgtagtcccagctactcgggaggctgaggcagaagaatcgcttgaacccgggaggtggaggttgcagtgagccgagatgatgccactacactccagcctggtgacagagtgagactctgtctcaaaaataaataaattatatatatatgaatattatataacatcatgatggagcataaaccagaaggacaaccctgaagccataaagtaaatcctagacttcatttaaaaatgtatatatattggagacagtgtcactctgtcacccaggctggattgcagtggcatgatctcagctcactgcaacctctgcctcccaggttcaagggattctcctgcctcagccttctgagtagctgggattacaggcatgtgccaccacacccagataattttgtatttttagtagaggtggggattctccatgttggtcaggctggtctggaactcccgacctcaggtgatccgcctgctttggcctcccaaagtgctgggattacaggcgtgagtcaccgcgaccggccggttttaggtattctttagatgacagttggttgagagagttaagctgttgtctgaagacatgaagtcagtagaaaggaatgcttgagttaagataagggggttatgggggctgaggaccttgttatgtagatgaaggttcctaagtagcagccctcagagagaatagatggtaaatgtctctttcagaccttaaagacatcagactggcagttaatctctcctagatctggaaaaggcctagaaagggaaggcctgggtgcattaatggagattctctaccaatgcaaatttccactgcaaaaggcagctttgcagagtcacttcaatgtgttggccctgtggcagccattttaaaatatgtcaaagaaatatattttgggataaaataatttggtttccttcagtgtctgctatctatcatgtgatgctataccagagtcaggttggaaagtaagccacattgtgtcaggttaattttaaaaatcgaattagatttttatagtttgtagggcatgactccccagaccccttagataggaatttcaagatcagagtttagtcctcatgccataggaaatcaaaagacaagttatagactgggaagaatatttgcaacacttaagaagagaggtgatattgaaactgcctttgcaaaaattttaacagtgagaaaattataacagtgaaagagatctgatccaaccaacccccatcttgcctttaaactctaaactgcccttggtcatccctgggcatgggccaagctaactgggggaaatgcagtttgcagtttagatgataatagcccttccccaaaactaaagcacctttgtaaaactaatgaggccgggcacagtggctcacccctgtaatcccagcactttgggaggccaaggtgggtggatcacctgaagtcaggcattcaagaccagcctgaccaatatggtgaaaccccgtctctactaaaattacaaaaattagccgggcgtggtggccggtgcctgtagtcccagctactcaggaggctgaggcaggagaatcgcttgaaccagggaggcagaggttgcagtgagccgagatagtgccactgcactccagcctgggcaacagagcaagactcaatctcaaaaaaaaaaaaaagaaagatgaaaggggcctgaattttgctaagatgtaggtggagttaaatgattaatggccattgttccagagaccacaagatttgcaacttcccctgttaatcctgtaaataacatcactattgtagaacctaagattggccttttgagatgtcttttcaggtttttgcatttatggtgaccggatggctccactccggactggcaagatggactcatgactcaactggtcttgtggcccccacccagaagcagacttggcacacaaggaccattttccacacccctataattgcacttccaaccaatcagccccctgtctgacaaactatccttgaaaaaccctaacttctgagttttcagggagattgatttgagtaataattcatctcccacgtggcgtggccagcctcatgtcaattaaactctttctttcttttcgagatggagtctcactccatcacccaggctggagtgcagtggcatgatcttggctcactgcaacctccacctcccaggttcaaatggttctcctacctcagcctcctgagtagctaggactacaggcatgcgccaccatgcctggctattttttttgagactgagtctcgctctgtcacccaggctagagtgtaatggcatgatcttggattactgcaacctctgcctcctgggttcaagcgattctcccacctcagcctcccaagtagctgggattacaggcacatgccatcatgcccagctaatttttgtatttttgtagagacaggatttcaccatattggccaggctggtcttgaactcctgacctcaggtgatccacttgccttggcctctgacattgctgggattacaggcatgagccaccatgtccggccttaattttttgtatttttagtagagacggagtttcaccatgttggccaggctggtcttgaactcctggcctcaagtgatccacctgtctcagcctcccaaagtgttgggattacagatgtgagccaccacacccagccaaactctttattgcaatgccatggtctcagtaaactgattttgtctgtgcagtgggcaggaagtgttaccagcagcaaatccaacgggtctatacagcaaactcgattcttgcccccttggaggaaagaacttggccaaggggcagaaggcagagtgagagaccaaggcaagttttagaacaggagtgagagtttatttaaaagttttagagcaggaactaaaggaagtaaagtacacttggaagagggtcaagtgggcaacttgagagatccaagtgtgctgttcagcccttgacttgttttatacgctggcatggttctgagatttccatttctcctctgtttttccttggagtgggctgtctgcatgcaccatggcctgccagcacttggatgaggctgcacgcacagtgtgtttactgaagttaggcacatgctcatttgaggcatttttcccttaccagtcaagcgttcctagaggaatgtcatacaccagttaaactccgccattttgcctcttagtgcacatacttgagcccgtttgcctaactcctgatatcttatttggaagttgctcattaccagcttcaggtgtttctatccattgagagattgcctttctctggtgccagctgcgaccaattattattttagcaagacagtttaacaaccacctgaccatcacctgatggttgcctggggatttgggggccttctcctgccctgttcatgtctgcctagctacctattctaacagaaggacccactggatgattacaatgtctctaataaaaaaatatccccacaaactgctatttgtaaaatatgtaaaagtgtttatgtaaaagtgtacgtatgtaaaagtgaacatatgaatagaaaatggaaaaggagtctgggcgaggtggctcatgcctgtaatcccagcactttgggaggccaaggcaggaggatcacttgaggtcaggagttcaagatcagcctggccaacatgatgaaaccccatctctacaaaaatacaaaaattagctgggcatgatggtgtgtgcctgtaatcccagctactcaggaggctgaggcggaggttgcagtgagccgagatcgcaccattgcactccagcctgggcgacagagcgagactcaaaaaacaaacaaacaaaaagtgctacttgttaaaacattttaaaggataattgatctgaattgcccattggagaaagaatatcctcaaacaaagcacagtggtgaatagtatttgcctatgtgttctggtaatttttcaccagctgagctagtgtaatcatcttgctaaagaaaagttctacagttctaagtaatcatgttgatttgaaataccacttacgcaacaaagttgaattgtacatcttttcttcccccagcagatggtgacattttatagaatatggaaaaattatccaaatggatgagtgagctatataactgaaatataatcgtctctatttcatttctcatttatctacatcttgaattcatttacaaaaaggcattcatcaggaagtaacatttaaagactatgctttcaggggtcatttgtttttcttttcttttctttctttctttttttttttttttttgacagggcctcactctgtcagccaggctggagtgtaatagtgccatcatggctcactgcagccttgacatcccaggttcaagcaatcttcccacctcagcctcctgagtagctgggactacaggcacacagcatcacactgggctatttttaaaatttttctgtagagacagggtctcactgtcttgcccaggctggtctcaaactcctgggctcaagcaatccttcctcagcctcccaaaattctgggattacaggtgtgggcccccatgcccagcaagggatcgtttctatagttccttcctaggaaagtttctctgaacatgtagagcatgttttttaaaaagtaacatttatgaaaagaagactaagaacaattaaaaaataacatatagaaagtagaatttttcaggccaggcatgtcatgccagcactgtacacctgtaatcccagcactttggaggctgaggtgggcagattacttgaggtcaggagttcgaggccagcctggccaacatggtgaaaccctatctctactaaaaaaatacaaaaattagccgggcatggtggcaggtgcctgtaatcccagctacttgggagactgaggcaggagaaccgcttgaacctgggaggtggaggttgcagtgagccgagatcgcaccactgcactccagtctgggcgacagagcaagactatgtctcaaaaaaaaaaaaaaaagaatttttcaatgtcttcaattcttagtttgcacagtgtttttactagatattttctcatcaggtcacatcagcctacctatttacaaaaataaaatagtaaggacaaaatgctaaagagggcaaatctgtctttaattaatgtccatctcaggccaggcatggtggcttacacatgtcatcccggcactttgggaggctgaggtgggagggtagcttgagcccaggagttcaagaccagcctggacagcatagtgagaccctgtctctaagaaaatgtccacctttgatttctcttcactccttttttccatgcagggccttcactcttctgtttctcaaattccttctttagtattatttcttccttcctttaagcttcacacagtaaagtttgcttccctactttctaaccgagagtatagcatataattaaaattcattcttaggtatatgtaattagtattctcagcttaatgtgccaattataccagggatatttcattcactagttcaaacggaacatcaattggagatctctcatctttcagatattcttgctgagctcacagtccatccagaaagagaaacaaattcataacactaatgtaagaggttttctttctttttgagacggagtctcactctgtcccccaggctggagtgcagtggtgcaatctcagcctgccgcaacctctgcctcctgggttcaagcgattctcctgcctcagcctcccgagtagctgggattataggcacccaccaccaagcctggctaatttttttatatttctaatagagatggggtttcaccatgttggccaggctggtcttgaactccttacctcaagtaatccacccacctcagcctcccaaagtgctggcattacaggcatgagccactgtgcctggccataggagatgttttaatgcagctgtgtacaaggtggaaacctagaaaatgaatcattaattctgttgaatgaactttatatgtgagcttcaaatttaagtgagatatgacagactgaaatgtgaacaaaaggtattttaggcagatggaacaacttgagctcagatatagaagcatcaaactgttcagcatttttgtgaaacccagaaaattctgactagaactcacagtattaaacagtcagtgtgccaacagaattgggatacaggacggaggaggaagagagaggaagcagtggaaagagactgcagaggtagatgagagccagactgggaaaatccttagaaggcaggccaaggaataaggacagcactgtaaaaacccttatgaggtgtcctaaggagtgtggacttgattctgctggccccagatagccttcttaagaaggtgtggagatggtagaggatggaagcagaaagaccaattaagagatgatggatcacacaaagctagagaggaaaagcacaatgtggattgatgaatggtggcgtcttgttggggggagagttaatgayggaggcatatttaagagatatttgcatggtagacttatggggctaggatgtctgattggatgtggtgcccgagaaagggagaggcatgcccaaagatgactgtggggtttctaattctggcatcttgctgtgtaataataacattcaaaacagaaattcatgaggaatagcagatttgtagaggatttgcttggggacaagatgaatgtggggcacctgggttggggggacatcaggtagaggtgctgagacagaattgaaaacatgagactaactggagttcaggagataaatctggagatgatttttctttgggtgggggagggacagagtttcactcttgtcacccaggccagagtgcaatggcgtgatcttggctcactgcaacctccgcctcctgggttcaggcgattctcctgcttcagcctctcgagtagctgggattacaggcaggcaccaccacgcccagctaatttttgtatttttagtggaaacggggtttcaccatgttggccaggctggtctcgaactcgtgacctcaggtgatccacctgcctcggcctctcaaagtgctgagattacaggcatgagccaccatgcccagcctggagatgatatttaagagtgaataatgtaaacttgttgggagaagccatgggaattgaaaatctcaggtggttgagtacaagaagagggggcccaacatggaaccttggattcccaatattttaggttaggtagaggctatgaagaggattaaggaggagcaagaaatgaagcgatgtttaagtacaaaagatggtgagaaactcctctcacagcacaacttgtatactcatgggagatggagtggtatacagtgatatcctaacaatctctctagagtaatccttgccccactttgaccagagcttggaagcctgtccagtcttcacattagaaagtcaacattttaagaatgtgaagaagtaagagtgttataaaagatgcctgacctacaccatgtaattaattttcctttttgttaagaaaatgttgaaattagcaaacgtggctgggggcggtggcgcacacctgtaatcccagcactttgggaagctaaggcaggaggattgcttaagcccaggagttcaagaccagcctgggcaacatagtgagacccgcatctctacaaaaataaacaaaattagccgggtgtgttggcacatgcctgtggtcccagctacttgggaggctgaggtgggaggatcgcttgagccccagagattgggggctgcagtgagctatgattgccgccactgcactccagtctgggcttcagaatgagtacccatctcttaaaaaaaaaatactaaaactaagttctattacaatttatgttttacttctcataaaataaattatacatattatcacaaggaagaaaaatgtgtaaaattagaaaaaattcctgtgagaagccactctttgcccagaaaatatgtttgtttattgatttatgtttttattagaaaactcaaaaggacctggtaagtgttctgccactggatttcaacaggaaatcaccatttctgccctctgggaggtagtaaaaaagattggaatacctcctcttttgaagaggtcaggaagtgtggtagatgctgtccagattctccttctggaataaaggaagtattctccagctgctgggagcggtgcccacagaaaaccctcagctgtcagcaacttcagtgattgccttggctaaaaagagctgcctcacccaaagttgcatccttctaggggtcagcctgcatctaatagctgaaaaacagggggcccagccctctcccctcaacaagcgacaactccgaataaccacctcatcttcaaagatcaccatgtggtagaccaagagagacaatgttgggcttgtgctgccacctgacttgcccctctgcccaatcctacatccttcccttcccttcaatagatgttgatctcaagggccctctctaataaatctcctgggtgcagagtttgaaaccagcctagccaacatggtgaaacctcatctctactaaaaatacaaaaattagccaggtgtggtggtgggtgcctataatcccagctacttgggaggctgaggcaggagaatcactcaagcctgggaggcggaggtttcagtgaacagagatcgtgccattgcactctagcctgggtgacagagcgagactccatctcaaaaaaaaaacaaaacaaaaagatatcctgggtgctaatctccaactcagagtctgcttcccagagaactcaacctataatgtgagtgaaatcacagggcttggacaaggcttgcaggcaaaccctatatccatccaccttttcatccattagagctcagaagctcaaggcagcttgggcattggaagtagagccatgaatacctggggtttattttattttattttaaaatgtatctttcagtaaatttcattctttttggtgtatagttctacgaattttgacaaactcaccaagccatgtaactactaccacagtcacgatgcagaagaattctaattccccccaaagaactacctaatgctgtcctgttatggttgattcctctactctgtgcttaatccctggaaagactaatctgttctctgtcaatatacttatgcatattccagaatgtcatataaatggaataatacagaatgtagacttttgagccggcttctttctcacagaataatgtatttgagattcagccacacgtgtcattgtgtgtatcaatagtctgttcctttttattgctgagtagcgttccattgtatggttgatcacaatttgtttctccattcaccagttgcttccagtttttagcaattacgactgaagctgctatcaacatttgcatataggattttgtgtgaacataagttttcatttcttttaaggaaatatgtaggcatggaattggtggaacatgtggtaaatatatttttaactttattttaaaaacctgccaaactgtttttccaaagtggctgaaccatttttgcattcccactagcaatgtatgaatgttccagttgttctacagcctggccagcaattggtattgtcagtttttttaagccattgtaataggtgcatcagtggtatttcattatggctttaatttgcattttactgttgatgttcagcagcttgttcatttccttatagacatctgcatatcttctttggtgaaatggctgttcaaatattttgccctttttgtttgtttgtttatcacaaaactagctttattatatttttcccagttagatttctttgttaaatgtcttcactgtcccagtgacttctggttcttattttcttgacgcacacaatgtcctcagccttctttttttttttttttttttttttgagatggagtctcgctctgttgcccaggctggagtgcagtggcgcgatctcggctcactgcaagctccgcctcccgggttcacgccattctcctgcctcagccttccaagtagctgggattacaggcgcccgccaccacgccgggctaattttttgtatttttagtacagacgcggtttcaccatgttagccaggatggtctcgatctcctgacctcgtgatccgcccgcctcagcctcccaaagtgctgggattacaggcgtgagccaccgcacccagccctcagccttctttggattttctgcacgcctcttgacattccacgttactctgtgcatattcactctccaaagtgcttgctgcagactggcttttcatctttcttgctctcaaacacatggagtctgaatttcctgcttctcctttcccttcctgattctgcacgagaacccccgcactcttctgccctctgctctcctctgccactttaggctgggagctcttattctgtctaacagacctcaagcaccttttgttttcactgactttgcccctaggtatgggtttctgggctccatcatctggattttgaatgtccatgtcttgggaggtcttcatgggcttgttttcatttcagtttatttgaattctttctgctaatacaatgaccttagttatttgctgttctacatcagtcttactttggcgtctggagagcagggacattcccttattttcagggactgagtcttgtaattcgtattcctctttgttggttttcatgttattgctgttcagatcttctgcaggttcaattctttttgcagaagtcctcagacttctyttcatgatgaccaagggttcgggtgatttgcctctcaccctgggagcaaccctctctgcttcttgctggctggcagctcctctatgatttcctctggtgcaggcatgcagtgcggcctcttggttcctgtgacacttccatcttttccacatcccctcttgaagggcagtgggggcagggaggtgttgcttttgctttgtgattttacagtctctggtgcctaccaggtctcccacgggttctactttaggggcctgaagaactcttctggatatttttagaggttttccactgtcaggtgcttgctttggagcacttgtaaagctatcagcaccatttgccagttcctcagtgtggcctggtgtttgagagagctcttggaagctggccagatcttctaggggttgggccttttccttgggcactcttggcaatctcctgctgccagttacattttctgggtccagcttctgctttgcaggttgcttaaatgctttcatgcctttgccctcaccttctggttctttattggtgtgcgtggtctcccctgatgtttgtgtgagcttgccgactgctaatagctcttctttcacttctactttctggccacaagccctgggccatttctttgagcttgttgcagtgtctactagttctggtggtgatttgcagggtattttggtggttttgtcatgagtcattgattcttcagtatgacctggtgctgggtctttgaagccagccaggtcttctagggcttgcgccttttccctgggtgctcttggccatctcctgctgccacttacacttgctgctggagccagtgtctgctttgcagattccttaaatgctctgatgcctttatcttcacctactggtcctttgcttccacggtttattgcccatttttatattggattgtttgtttcctcattgtttggagagctctttgtatattctggatacaagtcctttgttagatatgttatttataaatagtttctcccagtatattgttttttcatcctcttagcatcttttgcagagcaacagctcataattttcatgaagtccaacttatcaaatttttctgttatggatagtgcttttggtgtcatatctaagaattattggcctaacaccagaaaacaaagactttcttctgtgttttcttctaaaagttatacatcttatatttaggtctatgattgatttttttttttttaaacagggtgtcgctctgtcacccaggctggagtgcagtggtgtgatcgctgctgactgcaacctctgcctcccaggttcaagccatcctcccacctcagcctcccaagtagctcccaggcatgtgccaccatgcctggctaattttgtttttaattttattttttgtagagacagagtttcaccatgttgcccagactggtctcaaacacctggattcaagcaatccactcgccttggcctcccaaagtgctgggattacaggtatgagccaccaggcccagccaggtctatgattaattttaagtgaatttttgtaaaaagtatgggtaaatttctgcactctctattctattacattgacctacgtatccatccttgcatcaataccacactgtcttgagtactgtggctttatagtaagtctcaaaattaagtagcatgaatcttccaattttgttcttatttttaaaaaatgttttgaatattctaatttctttgcctctccatgtaaattttagagtcaccatgctgatatctataaagaatcctgctgggatttggactggaattgtgttgaatctatagataaatttttagagtattgacatcttcacaatattgagtcttccaatccatgaacacagttctccatacatttctaaatctccatatatttagctctcttttatttccttcatcattgttttgtagttttcagcacatagatctaggacatatttgtgaaatgtacacctaaatatttcatttttctggttttattttattttattttatttttagattgaatcttgctctgttgcccaggctggagtgcggtggcacgacctcagctcactgaaacctctgcctcctgggtttaagcrattctcgtgcctcagcctcctgagtagctgggattacaggcgcctgccactatgcctggctaatttttgtatttttagtagagacagagtttcaccatgttgcccaggctggtcttgaattcctgaccgcaagtgatccggctgccttggcctcccaaagtgctgggattacaggcgtgagccgctgcacctggccttctttggtattattgtaaatagtacttgtgcggagaagaatgatggcccctaaagatatccatgtcctgatccttggaacctctgtttatgttctcttacataaatggtggctctcacagataggtcaagtcaatatcatgaagatgtcaattctccttcctatgttatgttataaacttaccaactttcagtaagaataccaataagcttttattctggacctaaacaagttgatactaaagttcatatgaaaaaataaatatgcaagaatagctacatggtctaagtttcttgaacccatcatgttccatttccacctcattcagtcaggtccttctccaccttcagatctctgctcaagcatcccctgtgggaagtctttactacacacacacacacacacagagaagacagagagagagagagagtgagagagagagagacagagagagagagacagagagagagtgtgtgtgggcagatgtttttttgagtctcgctctgttgcccagtctggagtgcggtggcacaatctcggctcactgcaacctccgcctcccaggttgaagcaattctcctgcctcagcctcccgagtatctgggactacaggcgcccgccaccacacctggaaaatttgtattttttagtagagacagggtttcaccatgttggccaggcttgtctcgaactcctgacctcaagtgatctacccaccttggcctcccaaagtgctgggattacaggcgtgagccactgcgcccagccctggggcagacctttatgttatacactctcacagaactgcgttcctctccttcaagcacttggttcagtttggggttattcacacattaggagactgatttggttaaagttggtctcctctcttaggctggaagggacaacagggtcagggactgttttgctcattgtgtacctcctctgcccagcacaaccccagatacatgattgcacttgatacatatttttgaataaatatttgaatacataagaaaaagtctggtctctaggtccattgttttgaaagtagtaaagatgtgattttagcacccctatttataatgttggaaacctcatgaaaaacagaaaaggagattgtagaggtagattagagccagactgtgaaaatccttagaaggcatgttggccaggagcagtggctcacacctgtaatccccacgctttgagaggccagggcaggagaatcgcttaagcttaggagtttgagaccagcctgggcaacatagtgagaccccatctccacaaaatattaaaaaattatccaggcccggtgacacacagctgtggtcccagctactcaggaggctgaggtgagaagatcctttgagcctgggaggttgaggctttagtgagccatgatcatacccctgcactccagcctgggtgacagagcaagatcctgtcagagagagagagagagaaggagagagagagagagagagagaggatagcagaaaaaacgaatcaaaagaaatctttttttctttttctcagtctaaaatgctagtcttatttttttctcagccaagcaggcagattctgccttcccaatctctattcatctttttctttccaactgccatctatttcaaattctctgctctttcattctgtcccaataggtcttcctctctcaatcccaatctatgggatcccagcaagactatttttggaaagtcatttctgctaacgttacttactccctcaatacaaatcatcagtagtttgctatcaaagctcaaatgtaaagtgcttcttcccagcagtcaatcagacaacaaatgcttgttgagcacctactatgtgcttgacaccatgataaggtctggcattcaagacctctaacaacataattttcaaaccttaatgatttgcatcattatccaaagaccaattggaagccaagacagattctgagcagagaaatggcattgaccgaaatctatcactgattaaaaattaggccgggtgcagtggctcatgcctttaatctcagcactttggaaggtcgaaacaggcagaccgcttgagcccaggagttcaagaccagcctgggccacatggtgaaatcttgtctctacaaaaaaagtagccaggcgtggtggtgtgcgcctgtaatcccagctactcgggaggctgaggagagaggatcacttgagcctgagaggcagaggtttcagtgagctgagatcacaccactgcgctccatrcttggcgacagagtgagtcacagtctcaaaaaaaaaaaaaaaaattaaaagagggcaaaatagaaacagagactggctaggcagtttctacagtgctctaggggacagttggtcctctgagctagggtagtagcaatggcaatgaagataagtgaatgatttgaaaggacatttaggaggtaaaacccacctgacttgatgatagattggattgaagaagagggactgaggaagagggagatacccagaatggctcctaagtttctgactgcataatagaatagatagttttatcattcacatattaaaattgatatgccattgaggcaaccaagagggaatgtcaagtgggcaactggatttctaggtgtggagccccaaggagaggctggggctggaaatgtcaatttggagtcattgaagagatcataaagtgaaaaggaagagggcctggggaatcagcttcccacagcagcaacaatgtaccgactcataagacttaaagcttactctatgggatacactgttctgggattatacacacacacacacacacacacacacacacacacacaccacacccagttgtgcattgtttaatgatggggatgcattccaaggaatgcgttgttaggcgatttcatcattgtgcaaacatcataaagtgtacttacataaacctagatgggatagcctattacacacctaggctatatgtacagcatgttactgtactgaatactgtagacagttgtaacatgagatcatatttgcgcatctaaacatatcatctaatcatagaaaaggtacaataaaaataaggtattagaatcttatgggacctcccttgtatatgcagctcatcattgacaaaacatcaggtggcacatgactgcatatatatatatatatatatatatatatatatatatatatatataatttaattcttacaacaaccctgcaggataggggaggataggtactattagaactaatgtttgataaatgaggcacagagaggttcacttacttgcccaaggccatagagctgaagtggtggagctggcctatgaacttgggtggcctcactccaaaggataaaggatatcaacttgggtggcctgactccaaaggtcaatctctcaaatgctatgctctgaaggtgtagctatgaactaggagaacagttcacatgtgatgtcatagaagttggcagaagagatgatttgaaggtgggaactgtcaacagtgttaaatgttattgatacatatgtacacttacaatgtgtcagttaaaaatgttattgaaaggtcaagtaaggtgagccatgaaagtgtcctggattcagtaacatggcaccaggcatggtggctcacatttgttatcccagcactttgagaggccaacataggaggactgcttgagcccaggaattggagaccagtctggaatacataggaagactccgtatctacacaaattaaaaataaaaaagttagctgggagtggtggtgtgaatctgtgatcctagctaaactcaaaaaaaaaaaaaaaaccatggaagccattgataagcttagaaagaactgatgatgtggcaatatgggggcagaactcagattggagtgtgctgaggaattgttcctggaccaagccgagggtcggactgcttattctctcagcccaattacaagatgcaggtgaactgggaaagaagagagtttttatttctgtaaccaggtgcagggagaaggcctggaaattatcaccagaccaactcaaaattacaaagttttccagagcttacataccttctaagctacatgtctacgtgtaagtgtgcattcatctaaagacataagtgattaacttcttctaatctataactaaggtctgagtcctgaagaccttcctctggagcctcagtaaatttacttaatctaaatggatccaggtgctggggtgattgcccttatcttatctcctgctaaatcatggaggtttggggagttccttcagaccactaataacatgtgcttaatctttttaaattttattttatttttttgagacacagtctcactcattgcccaggctggagtgcagtggctcaatctcggctcactgcaacctccgccttccaggttcaagtgattctcctgcctcagcctcccaagtagctgggattacaggtgcatgccacgcccggctaatttttgtatttttagtagagacgagttttcaccatgttggccaagctggtctcgaactcctgacctcaagtgatctgcctgcctcggcctcccaaagtgctgggattacaggcatgaaccactgcacccagagaaacttgtttaatcttaaatgggtcctgttaagaactccttccttctcttgtcacgcttcaaggcccaggaaagacctaggcaaaactcttggtgtgcttttgttaccttccagcctttgtataagggcactggctctcttagcttttaatagttagcttaaccactcagtgctgaaacagttgttagggaggcctgcctgttcagccgttagggagacctggcctgccacagaatgagtaggagatgagagcacagagagaactagtatagacagctctactaagaagctgggctgtgaggagtgggtagagaaaccagtggcaacaggacaagggtaggagaagggcagagtgagggtacctggcagaaagatgcaacagcgggctagaatctggccaggttctgccttcaagctgttaaccttggactggggctgtggcctgaaggaaggggtacttatttgaatggggtcagcccccttgcaattcatctgtctggagggggcactttctgattctcacaagggtactgtatgtgttagcagcagctatgctaaaggaggatgcaaataaatgggactttaaagagagagagatagaggaagaaacagagaaagagatcaaactgtttaattttcacatcagtggaaataatctggttgagagggtgtagttgaatagggaggagaaatggtgattgataggagggaccggggcctactctattgtaccactctattgtgaaaaatggatagcagatctagtaacttagatgtgatagaaatcacttaatagaaaacaactttaattctgattgagttttccttctgctaggatgacagaccattgattgaccttattaattcctagggttcctctactcccaaggttgtatgtactcttgatctggggtcttagaatcattgggtttttggctcacctagttgccctgagatgtctccatcactgtcacttgacccttctgctgcttccaagctatgcctggggcccaggaaggtttggcacagtgcccctgatcatctctgtcaagctgaaccatgtggccacttctctttgactcctgctctgccctgacacattgccaggaaaaagagttcaggtgccctgggctgcaggatccatagacttctccctttgcccactcctcctagcctaaggaaaatgtctcagtggggttgggggcactagagtgctgctgctctttcttttgcttctccaaaacatttcgtctaagccctcacaccttctttatatcagctagcttttgctacaaaacaaacccctaaaacttacatctattatttctcacaatttggtgggtcagctcagttagggcaggaaggtgtagcacctttctactctaagtgtggtcctcagaccaggagcatcagaagcacccaggagcttattagaaatgtagtctcaggacccagtgcagtggctcgtgcctgtaatcccagcaatttgggaggacgaggcaagaggattgcttgaggccaggagtccaagaccagcctgggcaacatagcaagaccctacaatttttttttttttttttgagatggagtctcactctgtcgcccaggctggagtgcagtggcacgatcttggctcactgcaacctctgcctcccgggttcaagtgattcttctgcctcagcctcccgagtagctgggactacaggcatgtgccaccacacctggctaatttttgtatttttagtatagatggggtttcaccatattggccaggctggtctccaactcctgacctcgtgatccgcctgccttggcctcccaaagtgctgggattacaggcgtgagccaccgcgcccagcctaaaaaaaaattttttttaattagccaggcatgagaaggattgcttgaacccaggaagttgaagctgcagtgagctatgatcacgccactgcactccagccttccaccagcctgggtgacagagggagagaagaccctgtctatttaaaaaaagaagaagaaagaagaaagaagaaggagaagaagaaagaaaagaaatgtagtctctctggccccaccctaggtgtaatgaatcattttctgctttttttttttttttgagatgaggtctcactctgtcacccaggttggagtgcagtggcatgacctcggctcactacaatctccacctcctgggctcaagtgatcctcccgcctcagccttccaagtagttgggactacaggtgcacgccaccatgcttggttaactttttttgtgtttttggtagagacggggtttcaccatgttgcccaggctggtcttgaactcctaggctcaggatacccacccgcgtcggcctcccaaagcgttgggattacaggtgtgagccactgggccaggcccactttctgcattttgacaggagccttcaagcattaaagtttgagaagcactggtcgaggatctatctcctttctcacctgtctggcggtcagcaggcttgtttgtctggggggtggggggcctcagctgggagggcttattttctgagccatgttgctaacccaggcttcttcacgagccgatctcagggttccaaagagcaggatgagggcaattcccacagcaggagtatttttcaaacctttgctgtgtcatgtttgctactgtcccacaggccaatgcaagccacatggtcatcccagagtcagtatgggaaggcattgcccaaaggcaaaacagaggaggggaatactttgtggttatttaaaaaacctatcacactttccactatcagagttgaggcttttggagcggagggcggggggtggggggaagcgggaaacaccagcaactatttgcattctgcccagccacacctctcccctcacaccagcacagagccacctacttgcttaaaagatgagaggaggccaggcacagtagctcaggcctgtaatcccagcacaaggccgaagtgggaggatcacttgagcccacgagttcaagaccagcctgggcaacatacagaccccggtctctacaaaaaacaaacaaacaaacaaaattagctgggtgtggtccacatgcctgtggtctcagctgcttgggaggctgaggtaggaagatcgcttgggcttgagaggttgaggctgcagtgagtggtgatagtgccaccgcactccagcctgggtgacagagccagaccctgtctcaaagctttttaaaaaagccagagaggagggaaaagtgaaaacagaagggaaagttgtagattaatattgcaaaatcatatccttgctataaacgagatgtgtacagaggtcaatgcatatatgagtttggtagtggaaaagtgagagatcgtctaacatggtttctttatgaagtaggcagtaaggtcatgtgctgagaagaggtgggtgggggaagaggggtatcagaagtctgaggagactagagaaggtttgaaatcatcataatggaactggagactgggaagtgacatgaagaacctaagatttcagcaaccatttcaggttgatgattatgaggttatcttgatgctgatctgttctgtgggctcccaaagtgctgagattacaggcgtgagccactgtgcctggctcacacctgtggagaaatgtttcgcagtggtgtttgcaggcacagagaaagccaaaagcagggtttgggggattttgctagatgagtaatgaaaaggcagagggcacgtgagtttagcttattggagggagtgttattaaaataatggtatggcatctttcagctgaatatgaaaaattgagaagaaagtgggggtggtggtcaaaaagtggaggttggagaatagggaagatttgaacaactggctggaagaagaggggaattgtggaaagaaaacgaaatgcttgagtcagtggtttcacaggtggagtagcttccgtgatgaaaaagaccagtggagagcattgcatatgttctcactcttccaatttgaacaccttcccctggtggagataagtagatatgctttctatgttttattaactttacaacaccttccccaagctggtgaaaggaagctctcacttccttattcattagcctgatgaaacagagcaaaatgtatcttttttggttctgttttgaattttagtaactctagtcttcatctgcctgttggacttcctgtctctttttcatctatctttgggtacacatttcttcttacgggtccttttaaacaccgagctcctgagaaaggtcaccattctaccactttgattctgtaaatgtcttttgctcataggtgtcagaataggctgggttatactgtggtaacaacccccaaatctcgcaatcccaggaggtacatgggtactaagaattattcacattttacaaatgaccaaactgggccccagagtattggtaaaatgtgcagagcccatcagctggtgaaaccctaaggaacacaacacttagaatttcacaaaggctagactttatgaaatgtgctgcgtggatgcagtagtatctccaacccccctggaccgctctgccacgtacaatcttctatctttcagtccggaactcagtaacacccactccagggctgatgggggcgctggatgtatagtggcgagtgtttatctgcctaggatagcgatggctaggcaggggacataaaacagaagaggcagtgaccttctccgggtggggtctatggccctttactgggtacattctgtacacacaggcccctcctttgcctgaagtcattgatgaagacttcattacggagggtttggggaaaggtgggggtctggctgggtaagccggcgtcccagccccgctacagccccgcccagatctggcagagccgtgggcgaacccaggcgggcagaaaggcggggcgggcggctgccaagccggccaataggcggctctccggctgctaagccgagagggcaggggcgccgtcagtagcaccaccgccttccaagtttccccttgtggatgcgcggccccgcggctctgctcctcccggcgcagaggggccgggagaggccacaggagcggacctggcacgggatttctgaggaacgggagaagactggcgcccgacccgctctggagggtcggtgaacgatgaagggccggcggcggcgacgccgagagtactgcaagttcgcgctgctgttggtgctgtayacgctggtgctgttgctcgtcccctccgtattggacggcggccgcgacggggacaagggcgccgagcactgccccggcctgcagcgcagcctgggagtgtggagcctggaggcggcggcggccggcgaacgcgagcagggagcggaggcgcgggccgccgaggaagggggcgcgaaccagtctcctcggttcccaagcaacctcagcggcgctgtcggggaggcagtgtctcgcgagaagcagcacatctacgtgcatgccacctggcgcaccggctcgtccttcctgggcgaactctttaaccagcacccggacgttttctacttgtatgagcccatgtggcatctatggcaggcgctgtatccgggcgacgccgagagcttgcagggcgcgctgcgcgacatgctgcgttcgctcttccgctgcgacttctccgtgctgcggctgtacgcsccgccgggggaccccgctgcgcgcgccccggacacggccaatcttaccacggccgccctcttccgctggcggactaacaaggtcatctgctcgccgccactgtgtcctggcgcaccccgtgcccgggccgaggtgggcctcgtcgaggacaccgcctgcgagcgcagctgcccacccgtggcgatacgcgccctggaggccgagtgccgaaagtacccggtggtggtcatcaaggacgtgcgcctgctcgatctgggcgtgctggtgcccctgttgcgtgatccaggcctcaacctgaaggtggtgcagcttttccgcgacccgagggcggtgcacaactcgcgcctcaagtctaggcagggactgctgcgcgagagcatccaggtgctgcgcacccgccagaggggcgaccgcttccaccgtgtgctgctggcgcacggcstgggtgctcgccccgggggccagtctcgcgcgctgcccgccgcgccgcgcgccgatttcttcctgaccggtgcgctcgaggtgatctgcgaagcctggctgcgcgatctgcttttcgcgcgcggcgcgcccgcctggctgcggcgccgctacctgaggctgcgctatgaggacctggtgcggcagccacgcgcccagctgcgccgcctgctgcgcttctccgggctacgcgcgctcgcagcgctcgatgccttcgcgctcaacatgactcgcggcgcggcctacggcgccgaccggcccttccacctgtcagcgcgcgacgcccgggaggcggtgcacgcctggcgcgagcgcctgagccgagagcaggtgcgccaggtggaggccgcctgcgctccagccatgcgtctgctcgcctaccctcgcagcggagaggagggcgacgcggagcagcccagggaaggggagacgccgctggagatggatgccgacggcgccacgtagcctcccatccctgtccccggcacggatccgggtaaggtggcccggggcaaggcagggaccgggastggtcttccgggagcctggaatggcctggggagggggaagtgtaggggggagggtaccatgctggatcccattctatcagatcaggtccaagaggatgggaaagtcctgctcgtagaatttggtagattcatcggaatctccagcttagcctcgcgcctccttagagggagatcctgagatgagagaggatatttaggcgtgactgaggtggaagccaggtctctgcaytcccattcccctgtatgaagtaggaggtttcagagggctgaggagagtagagaaggtttgaaacagtcataatgagccgtgagactgggaattgacatgtggagtataggatttcggaaaccatttgaggttgatgattatggagttatcttgatgccagtttgtcctgtgaggagactttgcaatggtgtttacaggcacagagaaagccaaaagcagagagtttggtggaaaggcattgattctaaccctacctatccctaatctttctgtttcatgtttcttctctgtctgttttatgcgcaggctccagggcttttctcctgaatttccaaacatgcaggcacagtccagcggctcttgcaacacttcttgcacattgtgtgtctcaggcgcttgtgtagtgaatagacttgctttcccctggctcatgtgcgcctctctgtctcccctccccctccttccctctctcatttcccctctccctctcttcctcttcctcccccttcccctcctcctctcccttcccccttctccctgtagctggcgtttgcaggatatttgaccatatcccattcacatcaggtcacaaaagctgcctggtcagcttcctctagtgtcgacaagacctcagggttgggtgtcccccactccaccccatccgtttgacagatggagccttcaattggcagtagcagtttgtgactgcaggaggagctttgtgaaaagacactgccccctcttttttgtttttccatttttgttttttgtttttttctgtatatctgaagatgctaaagtggggcttaaacagtctcaaaatgtgttctgtgtgggtcagtgtatggcctgagggaagggtttgttctgcacagtgctgaccataggagtctacttagtgacatgggagtgtgtttccccaaactttatgtgagttggaagggtgccgccttctgcactgtgcagtcagtccagaggaggaggaaaagtagtgctgggtgggcggaagtgagttaagtttccattcattattttatagtgtaattcagcattcccctgagatgaagctctgaggacaaacgttgaagatattaatgaagagggattttgttgttgttacagaaccagggtttcagagtgatttcagaagctggctaactaatttttctcccagtaatcaaatggttttyttagtcagtttctgaaattgctaggaagtctgtgttctttcctgatttccagagtgatggaaggtaaggcacagggtgacttgtcacatcttaacaaaaacatcctttcatctgctgatcctgtatttacagatataacagtaattgtccctaacccttcttcacaggcctgagggaactcctcccctgggcggaatgctgtgcattttatggctttaagacatgacaatctcccagaaacttttgcttttttttttttttttttttcatttttactaacatctatttgagtactggctggggtgaagcattaaagagaatagagaggagggtagaggacagtctttgccctctaggaggttagagtctgtgtgggtgacagtgactgtgagggaagacactggtgttgctgtttggaaggccgatggggcttcctttgcagggctgcagggacatctgggagcaagctttaggctcttccagactttagtgactgagtccttcctcccgcattgggcacttaccaccaatcagtgggttgattacagtgcttgtattcttggttcctaggaagataacgttactgccgactcactgatgggttttccaaaagtttgtcacactctattctagagaagggaggagaagagagggggagggatccttactgaagggctatgtgtcatgcactgagttaggcattgtacatatatcattatttataccagttttccagatgaggaatccgagactcagagaagtaatttgcccaaagtcatacctgggctggtgagggtggaacagtgtttggtgttagactccagagctcataatcctctcttttatacctcacctggcccctgccttggcattccctggcagcaccctgatactccagctaggctagtatgaggtggaaaacacactcagctttattactaatatgtcccaaccactgaacaaataaaatatccctgagctgccgacagtgcctacacaggaaagccgacaactttacagccatcctccccacagggcatctcagggtgccctcagctcaactgaggagagaggccacatgtgaattaacctgagtaacttctggatggtccatacccaatggccaggatttggcagtgagggagtyagtgaagttttttctggtctgggtaggggccgtagcaccctgaaccaagtcaccaaggacctaggccctttctatcttttacatcttggctttcattcactggcttatcttcccactgtaacaagatggtagccacagctccaagcaaaacatcttcacacaacgacacagggttattaaaatacagaaaggaaggaagctatctagccagtaaggggtggaggggtttttcctcctgccatgctcttttttttttttttttttttttttgagtggcagctcttactctgtcacccaggctggagtacagtggtgtaatcttggctcactgcaatttcctcctcccaggctcaagtgatcctcccacctcagcctcccaagcatctgggcccacaggtgcgtaccaccacatccaatctttcacccaggctggagtgcaatgtcatggctcactgcagcctcaacttcccagggttaagcaatcctcccacctcagcctcccaagtagctgggactacaggtgcacaccaccactcaatctcattaaaagaaattttttttttgcaaagattggggatgggcggggagtgggggctctcactgtgttgcccaggttagtctcgtactcctgagctcaagctatctgcctgcctcggcctctcaaagtgctgggattatggatgtgaatcactgcacccagccttaataaattataacacctttcccagaaccccctttaccagccgacgtccctttatgtctcattagctaaaactgggttatacagcctgccctagcccaatcattggtgaaagggaatgggagcattgtgattggcttagaccagcggttctcagccctggctgaacattacatttacatgaggagcttttttatttatttttttaatgccaatgcctgagctccacccccagagattctgatttaagtagtctggagtggagtccccagactcaggcactgggatgtttgaaaagctccccagatgatcctactgtatagccaaagctgagaacctctggctcagaccagtcatggttcatcccctgggccagatgggaccagaaggctgccaccggaacaagatcaggatggggaataaagggctgttgatgagcactgaactgcttgccacagtaatttatgtgaaagaacttggagctatgaagtgccaagcagatgtagagtgttattatggaaaggggaaaatgtcctcaattatacatgggtccatttatcaccctctcacatgccttcacatgctttgttgtctgtagctcattatctaattatctaataatccatcattgtacactatccaccactgttctggacagactgatgtgctatcctgtccttttcagcatgtctccctttaatgtctgcccttggtaggtcccaaagtttcatcccgctaggcatttaaggcaccttgatctttgctcttgacatgacatatgcatcctttgaaagaaattaggaaagaaggcaaacaccctgtaatttgaaccctaacaatcaggaagctttctttctaaagaaatcatgtaaacaggaaaagaaatgatcaaccaccaccaaatcattttgaaaatctattttaatcaggaaactgggccacaaacattttatataggcttatgtataaatatcactgaggccgggtgcagtagctcacacctataatcccagcactttgggaggctgaggcaggaagatcgcttgaggtcaggagttcaagaccagcttaggcaacatagtgagacaacccccaccatctttacaatttttttttaaactagctgagggtagtggcgcgcatctgtagtcccagctacttgagagggtgaggtaggaggatcgcttgagcccaagaagtcgaggctgcaatgagctgtgatcacgccactgcgctctagtctggatgatagagagagaccctgtctcaaaagataaataaatatcactgaaaagtgaagctgttgcttacacacagactgctaaagaatgggcattttttttttttttttttgagatggagtcttgctctgttgccaagctggagtgcagtggtgcgatctcggctcactgcaacctctgcctcccaggttcaagcaattctcctgcctcagcctccccagtagctgggactacaggtgtgtgccaccatgcccagctaatttttttgtatttttagtaaagacggggtttcaccatgttggccaggatggtcttgatctcttgacctcgtgatccacccgcctcggcctcccaaagcgctgggattacaggcgtgagctaccgtgcccagcccagaatggacatttttgaaacattgctcctatatagaatttctcattcaacaaaattatcttcagactcctaatagcatatcaacctgggtgctaggtttgagccagagagctggaagttaggatggtgtgtgtgtgcgcatgtgtgtgtgcacatggataggtacctgagtagcagggctgcaatgaggtgtgaacaatttttaaaaatacatccatgtccaaatcattattgctccttgtgaggttaatgctacctttgatcaaggcactcggagctcccatttgggcctgccttccctggcaggacccctcagctgatggatacggtgttaaggaaaagtcaagacttgtcaagtctgatgagtgaacagggaaggaggctggtcctacaaagcaaggggtggacataaagtagtaacagtcattccttgctttctatatgaagtcagtttttgaattacggcatgggaacccaggcatcagggcctgcctctcctggttactacttaattgacctttggcaagtccctaaaccttttcagctttagtgttcttaccaataagaagaggaagtcaaattaaaaggatttctgggccaggcgtagtggcccatgcctgtaatctcagcactttgggaagctgaggcgggcggatcacttgaggtcaggagttcgagatcagcctgaccaacatagtgaaaccccatctctactaaaaatacaaaaattagctgggcatggtggcgggcacctgtagtcccagctacgcgggaggctgaggcagaagaatcacttgaaccctggaggcaaaggttgaagtgagctgagattgcrccattgcactccagcctgggtgatagagccagactctgtctccaaaaaaaaaawaawaataataataataataattaaataagggccaggtgcagtggctcatgcctgtaatcccagcactttggtaggccgaggcaggtggaccacaaggtcaggagttcgagaccagcctgaccaacatggtgaaaccctgtctctactaaaaatacaaaaattagccgggcatggtggcgcgtgcctgtaatctcagctactcaggaggctgaggcacgagaattgcttgaaccagggaggcagaggttgcagtgagctgagatcgcgccactgcactctagcctgggcgacagagcgagactctgtctcagaaaaaaaaattgtagaaataacataagcatgtggtaaaaatagaaatttttttttgaggcggagtttcgctcttgttgcccaggctggagtgcaatggcacgatctcggctcacctcaacctacaccatctgggttcaagcaattctcctgcctcagcctcctgagtagctgggattacaggcatgcgccaccacacccagctaattttgtatttttagtagagacagggtttctccatgttggtcaggctggtctcgaactcctgacctcaggtgatctgcccgcctcagcctcccaaagtgctaggattacaggcgtgagtcactgcgcccggtcaaaaatagaatttaacaggatagaagtttataaaatacctgccagtctcacttcctagaagcagccacaatatttcttgtagtatatgtctagaaatgttttacgcaaattccggcagaaaaatatagcctttttatacacaaatgggattgaactctatttattgttctgcacttttttcacttattgctttgaaaatcttcccgtttcatcttctttttaatagctatattgtatttcatggtaggaatgtattataacatatttaactagctcctagttccatactgtagggcatttagttgttatagttttgtgctctatttcattgcatttctagtagggtccttgtatttgcatacatgtgagtatgtctgtcagaaaaattcctatagcagagtgaccttatatagcaaaaggtatatgctttgtacattttgagaggtaatgttcttcaaagtcgtccaacattcactaccaccagcaatttcttggaacgtctgtttcccagactttcaacaacatagatttgatttcattttttcatcttggccagtttgatgaatggaaaattcttgctgctggcatcctggctctctctgaccctacagttcatctctgatgatgaatgatggcctcatactttgggttgtagtcactggaatgccaaaatgaaatcaacttcttagcccttctacagtccacatgtatttagagagtgttatttttgtgattattttgaagaaatggatacattttggtataaaaattatccctttagaaaatcacacttcgacaggacatcaggttttagcaaggttcttgttcaggcggccttcttctggtactgttgcaggggattgtacttactgactcgagcataaacaatttggggaccctatcactggggaaattaggctgattttaaataaggtttaaccattcatacattttctctatgttcctgagagccctctttgtggtctcagcaggggaagggcagaagtgcccatttgcagtttttgaggcaggattcagacggttttctaagaggtttttttttttttttgtcttggcagagattttcttcccatgaatatgaatgtaatataaatagttgggagtgaagcttttgaaaaacatttacaaacagctggtttaacattcttcagtatgctttgtctcagcctgccctcagcatgagcaggccagaaaagaatgaaacaaaaaaaactaaactggcctcacttttttgtgtctgacgttccagttgaacaaggtgactaataaatgaacccctctctttgtgaggtctcctggctcctcagcctcttgcttcatagtggaaataaaaggaacttgctctattgaaaaggacatttctgctgaggtgcagtataaaataagaatagtagggattaagaaacagctctggctcaaattcaagtccacaggcaagtgggaactgtttgggaattgaataggaagcagttttaattggagaaaatagaaaattgcggagctcagtgatgtgtctataattggagtccttcagctttgctccccggcccgcttggcaccctggcaccaagccagtggccaggtctgacattttctgcagctgaccctgttcataattaagaccaccctgctggatgctgagaataaattagagcatcagctgatgatgaatatttttaaaaatttgttatgaatacatatttgtacatgtttatggagtgcatgtgattttttcgttacatgcacagtgtgtaatgatcaagtcggtattggggtgcccatcacctcgagtgtttataattttgatgtgttgggaagatttcaagtcctctctcctggctattttgaaatacaccatacattgttgttaactgtagtcaccgtactctgctattgaacttagaacttacttcttctatctaactgtgtgttcatacccatttaaccaatctgtctccacgacaacccccacaccctttgcagcttctggtgaccaccattctattctctacctccatgggatcaacttttttagctcacatctgagtgagaacatgcaatatttgtctttctgtgcctggcttatttcacttaacgtaatgacttccagttcttctgatggtgaatatttttaaattcggagattaagaggctgtgaaagagggccaccacatttgatttcaatgatgactatattctgtgccagcagattcccctcccatgaaatggatgggagcaggaagaactttgctgtagagtcacattctgaaaatagccactgaggtagacacgttttgcttacagaatcgaagccctttctagaatgttaaaaggtgccttggccgggtgcggtggctcacacctgtaatcccagcactttgggaagccaaggcaggcagatcacccgaggttgggagttcaagaccagcctgaccaacatggagaaaccccgcctctactaaaaatataaaattagccaggcgtggtggcacatgcctataatcccagctactcgggaggctgaggcaggagaatcacttaaacccgggaggcggagattgtggtgagccgagatcgcaccattgcactccagtctgggcaacaacagtgaaactgtctcaaaaaaaaaaaaaaaaaaaggtgccctgaagatagatgcagggtactctctgggccagtaggccagtaagaagcctgaagtctggcctgaaatccaaatgcctagagcgagtgcttgtttgattttaatatcactggttcatggtatccagcaggttggaaaccaggaagccaacctaactgaagggctgaagtgtgtaattctgccctgaaatagaacatcacagaaagctttgtaaggcatggggagtgcagccgtgatcaagactgtgagttcttcagtaaagatgatgaagtgaggaaagctatgagcagctttaggagggaactcagaggctaattgaagaagtcattacatccagacagataaggtagacattaggaaaaattgtaccagagctttgaggtcacttttcccatgattgagaccatattttctcaaaaaggactctttactgcctcagagaaattataggaacagtaagccaaaaatgctaaaatcaacataatattttaaaaataggaccaactggcgaccagccaagaactggcatatgttaaatacacagattttagaagtaagagaagtagatctgtctcttgctataataaagaatatcactaacatggatataataaaggaaaaaaacacatttttcagggtctgcacataacaaaaaagttcctctttgttgtytttctgcaccctcccactttctcttttttttcttttcctttctttctttttttcttttcttttcttttttttttttttgagacagtcttattctgttgcccaggctggagtgcagtggcatgatctgggctcactgcaacctccgcctcccgggtttaagcaattcttgtccctcagcctccagagtagctgggactacaggcatgcgccaccacgcccggctaatatttatatttttaatagagatgtggtttcaccacattggccaggctggtctcgaattactgacctcaggtgatccacccaccttggcttcccaaagtgctgggattacaggggtgacccaccacacctggcccaccctcccattttctagctgctaggaattacagagggcaattttgcaaaaaggagatgattggccaaaaacgtacacatccctcgcaaagaataacaaaattcctaacattattgaatgccttttaaaataattttacttcatatttatttatgtatgtatttatctatttttgagacggagtcttgctctgttgcccaggctggagtgcagtgacgcgatatcggctcaatgcaacctgtgcctcctgagttcgagcgattctcgtgcttcggcctccagagtatctgggactacaggcacctgccaccacgcctggctaatttttttgtattttcagtagagacagggtttccccatgttggccaggctggtctcaacctcctgacaagtgatccgcctgcctcggcctcccaaagtgctgggattagaggggtgagtcaccacacccagccatttttatttttcaacagtcaaaggggaagagaaatcatctgagctcaggaaaaacccatgtcttgatccttagtgcggccacctccagcaatcctgtagactggcctccacgatccaatgtcctatgccaacacgaacctgctctaggccacggagccactttactcccacaagaccatggacaagaaaggctaggaaagggtggaacaaacatactgcctcactctgcagggagagatacctgcagtgattggctagagtttggctggtccatagattctgtacactgactagccattctaacctgggaatcttaaagctgatcaagggcagagaatgagacttcctgggcagtcccagtgtgggggtagggaaacttcagttgctcatttgactgataacccctatggggaccaatggcagcctgaattgcagatctaagctccaggtcacttcccagctctgtgctctcccaaatcccttccactctcacttagtggatcacaaacatctgcaggtggcttgtccaaatatatattataaaatactgagtcagttcctttattggagttgggagcaactttactcacaaaagcaattaggtatgcaaactaaatttatatcttggagcagctcaatgaaaggaaaaaacaaaagtcaactaggcaaactcagctgtttccaagtttttttttttgtttttttttgagatggagtttcactcttgttgcccaggctggagtgcaatagcacgatctcggttcaccacaacctccgcctcccaggttcaagcaattctcctgcctcagcctcctgagtagctgggattataggcatgcaccaccacacccagctaattttgtgtttttaatagagatggggtttctccatgttggtcaggctggtctcaaactcccgacctcagctgatccacccgcctcggcctcccaaaatgctgggattacaggcgtgagccaccacgcctggctccaggttttattaatactggtttggtgtgcatccatttgttctcaagtgagctcaaaagtttgggaaatttttagctggggtgggtatcataaaactggagagatgttattatcttattctattctagaataagaggaaaaataatgcccatttaatttttgtactggctgactctgggcttgaatgactcacgtggattgagattttacattgaattcctcccacggtgggaggtgacggcgggagtgtgtgtctctttagctctccactggggccatccaagtccaggcaagtttctcccctcactccccagtccagagttttgtctttttgtttttgttttgttttgactcagcctctatttctttttaaacctgagtggagagttgtttcaagttgaatatgactgaaactgttattgactagtgcaagtataaataactagcaccccgtgccactgccacataatttttcagattaaatgtctggaaattatgaataacatttaatgctgtttaaagtacgtttccaggctatctgggggtgcagttatattagcaaactaaatgtttcctattacattttgctttggagtcacaatgagggaatgtactttgagatttctgctatttcaaatattattttaacattatccctaagcagctcccttaaaaaacaacttaatggtgctattgttgtaaacattgtcactcatttccgttttccttggcactgtagttgctaatttgaagtgaaaacaggaaggttaagaaagcttaacctgggttaacagataagcttagatattaacatcatccacaaagtgtggtttcagtttaggatgctgggagaagaccccataaggacacagccrttgcaaaggacgctcaagcccttcctcagcccatttgttstggaggtggtscaggaggaaggctgttacaataggctggaaagtsatscagstggtggtaacaggacttgctgaatactcggaaatctcagctctctcaagtgctaagcgccagcaccaacttttagcatctgtgaagtagttttggtggtcaatccagggtgcctcacctggtgcaagtgtgtgggcagggacaggataactgagtccagtcacaggcatgtatgttttggaggcaagaccaagaaaaacttgaagaggagcaggcccaaattgacaaacataattcaaggagtagaaatgaggtccccgtgcaagttcccagattcatttgggaggccctaggctcattacctgacttgaaatggggggcacaggaaggccactgagagaggcagagcctgttgcaagttcattggcttgaatcttctgttctctaactttaaagccagcaggaagttgattcatccccctcccccatcccggcttcaaagattgaagaaagtatgattaaaatgctaaaagcgcgtcttcctgagttattctgctgtagccccaggagcctcagccgagccaagtgcttgcaatycaggctccatagacccagaatgaacccagaatgaagtttccctttgatggcaatgaggctattagtaggtcaaccagctgcatttagggcctggctggtcatttaaacactcaagggaactgtagcaaaggagataaaattacacccagctcattgaaatatgactttcaatctttaaataaataaccatgctttttttttaaagtgaaagccaattcttgaattatttgaatattgaggaatgacctcacatttcaatgtcactttttttttttacaaaaaaccttttatgcgtgcttttcaaaacaacggtatataaaaacctttataattcttgagattaattgcatgaagacagttttttattatgaattttctattattacaggataggtctttaaatagttctgacttaggaataaacagaagggtctatgattgtttcaggtgagacagagagtagcaaacattttcattctccccagattctgggcaagtggaaacagttgtaaccaagaagtttagcagcttaaaattttaatttttccttgtcagacatctagcagctgaaaaaaaggacaaaactagctacttggtaactgcagctggctggtaaactgagggtttgagttctaaatatgcacccaaagatgaatatttcattgctccctatgaacagggccccataatattaagaagagttgggatccggattaagagtgaattgaattcttaatccttgtgctcacacctgtaattcccagcactttgggaggccagggtgggcagatcacctgaggtcaagagtttgagaccagcctggccaacatagtgaaaccccgtctctgctaaaaatacaaaaattagccaggtgtggtggcaggcacctgtaatcccaactactcgggaggctgaggccagagaattgcttgaacccaggaggtagaggctgcagtgagccaagatcgcacccctgcactccagcctgggcgacagagagagactctgtctcaaaaaaaaaaaaaagagtgaattaaattcttaatcctctatttaagattctggggacttaagagtttgaggaaacatcacagtaagaattcatagacacatttatgttttaaacacaaccaaaaatattgagaaatggtaggaaattagctgatagtttacttagggtgtacttgggagctacaggtctcatgaaggtgtaagtcagaaccggaagatatataagcatccttgacatagttcagggacattcaggaactagaggccaacacgggggaataggaacccattgcagaaagaaagggccttgtgaggttgccctgcctgaattagcggtacttcatttaagttcttcaaataccccagcagcagccagcaatagttctttcagagcacacatctctccttccctcaccttgtactgccagcgattcaataaaaaatatgaacctgcatgaaaagcagccttttgggtagatacaaagattttttaataaaaggatataaaagagtgcttatgggtacagatgttgggctggtagtactctccataaaagtttgttgagaaatgggatctgacctggcaacatttagcacttggttagtcattgacaaaaccatcctgagttaatgccaagtttgtttccggtctttaaagccacccaagtgaagagctcaacmtgttgcacaaagaaacaatgacagattttttttttttttactttttattttgaaataattatataggccgagtgtggtggctgatgcctttaatcccagcacttagggaagtcaaggcgggaggattacttgagcccaggaattcaagaccagcctaggcaacataagggcatcccgtctctacaaaaaaataaaaaattagctgggtgtgcctgtagtcttagctactcaggaggctgaggtgggaggattacttgagcccaggaatttgaggttgcagtgagctatgatcacgccactgcagaaataatatactcacaggaagttgcaaaaacagtacaagaggtccagtgtacccttcaaatagcttcccccaaaggaacaccttatatgtagatcaatatcaacaccaggaaattgacactggtgagatctaacaacagaccttattccattttcagcagtttttacgtgtactcattttgtgtgtgtgtatagatctgtgtaattttattacatatagatttgtgtaaacaccactacaatcaagacacaaagctagtccatcaacacaaaaaaactctcttgtgctaccctcattatcattacataccctaccctatcccacccctttcactggcaaacactaatctgttctccatctctataattgtgttatttcaataatgttatataatggaattacataatatgtaaccttttgagattggcatttttcactcagttgtaatcctctggagattcatccaggttgtcttgtttaataatagtttgttctttttcattgctgagtaatatttcatggtatggttgtaccagtttgtttaaccattcactcactgaaggacatttggattgttttcagtttttggctattacaaataaagctactatgaatatttgtgtatgggtttttgtgtggacataagttttcatttctttaggatgaatgtccagaaatgcaattgctggatcgtgtggaagtgtctgtttagttttataagaaactaccaaactgttgctgagagcagctgtacccttctacattcccaccaacaatgtctgaaagatcaaatttttctacatcttcacagtatttggtattgtcactatatttcattttatttttattttatttttttcagatggagtctcactctgtcgcgcaggttggagtgcagtggtgcgatctcggctcgctgcaaccgctgcctcctgggttcaagcgattctcctgcctcagcctccccagtagctgggattacaggggtgcgccatcacacccagctagtttttgtatttttagtagaaacagggtttcaccatgttggccaggctggtctggaactcctaacctcaagtgatctgcccgcctcagcctcccaaagtgctgagattacaggcgtgagccaccgcgcctggccgagatttctttttttaaaaaaaatctcttttttattttattttactttaagttctgggatatatgtgctgaacatgcaggtttgttacataggtatacatgtgccatggtggtttgctgcacctatcaagccatcatctaggttttaagccccgcgtgcattagatatttgtcctaatgctctccctcccattgccccacaccccctgacaggccccagtatgtgaygttcccctccctatgtccatctgttctcattgttcagctcccacttatgagtgagaacatttgctgtttggttttctgttcctgtgttagtttgctgaggatgatggtttccagcttcatccatgtcccagcaaaggacgtgaatgagatttctttttcaagagccttttaactattaattcaattttttagtagttacaggacttttcaaattatctatttcatattgggtgagttatagtagtttgtgctttttgaggaattggtccatttcatctaaattgtcaaattaatggatgtagagttgtttttagtaatttttttttcttttgccttttaatgtctgtggtgtctgtaatgaaaacccctgtttcattgctgatactggtaatgtttgtcttctctttttctgttgtcagtcttgatagaagttttttgtttgttttctgtttttgtttgtttttgttttttgttttgttttgttttgagacagggtctcactcccattgcccaggctggagtacagtgatgcaatctcagctcacccgccttctgggttcgagcaattctcctgcctcagcctcctgagtagctgggactacaagtgctcgtcaccacacccggctaatttttgtattttttgtagagacagggttttgccatgttggccaggctggtctcgaactcctggcctcaagtgatccacccgccttggccttccaaagtgctgggattacaggcatgagccactgtacctggctgatagaggttttttgatcttttcaaagtaccagctttttgtttcattgtattttgattgtttttgttttcagttttactgatttctccttttatcttaattatttccttacttctgcttgttttgggtttttttaatcatctagtttcttgaggtaagtacatagattattgatttgagatctttttttctcatgtatgtatctagtgttacacattttcctcttagcttcacaaattttgatgttgcattttcattcaatatagttttattttcaatgaattatatttaagtatgttctttaattttaaaatttctggataatttcctgctatctttctgttattgacttctagtttgattacactatggttatttaatttattattattatttcaatttttaaacatttgttcagatttgttttgtggaccaggataggttcatgttgtgaatgttccatgtatacctaaaaataatgtgtattctgttaataggtggaatgttctataaatgtcagttcaattctgttggttgatggtactgttcagtccttctgtatccttactgactctctgtctagtgagtccatcatttgttgaaagaatggtgttgaagttttcaactatagactcgtccatttcttctttctgttctttcagtttttgcctcaggaaatttgaagctctgctatttgctctgtacatatttaggattgctataacttgtttttggattgaccttttaaaccttatgtaacattcttctttgtccctggtaattttctttgctctgaagtctattttatctaatattaatatagctactcttcctttcttttgattaatgtttgtatggtgtatccttttcagccttttactttcagcccatctcattatattagaaattaatggtaatgtttttaaatccattttgccaatctcttttagtttatgtatttaaaccatttatacttaatctaattattgatattttaggacttcaatttgatttgtttgttccctctgtttttattcctttgttttccttttcctgtcttcctttgagttacttcaacattttttagaatttcattttatctgtagtgtttttgagggtatctctttgtatgtttattttagtggtttccttgaattatacatgtgtaacttatcacagcctactggtgtcaacatcttactacctccaatgaaatgtagaaaactaatctccatttaggttcctttatcctgccccttaaatagtctcttaaaaattttctctacatatattgagaaccacatcatacaatgttactttgcctcaaccatcaaaaataattttaaaaactcaagagaatagtttattaaatttactcatattttacctttccgttgttctttcttcatttgtgatatttcaagcctccttttgtcatttcctttctctggggaagaactttagcagttcttttataaaagttctgttggcaaaaattatcttagttttctttcatgtgaaaatgtctttatttcaccttcattcctgaaggatattatcatgggatatagaaatctggatcgaggctgggcactgtggctcactcctgtgatcccagcactttgggaggccaaggcaggtggatcacttgaggtcaggagttcaagaccagcctggccaacgtggcgaaaccccatctctactaaaaatacaaaaattagctgggtgtggtgacgggcacctgtaatccagctacttggaagaccaaggaatgagaatcatctgaacccaggaggcggaggttgcagtgagccaagatcacgccactgcactccagcctgggtgacagtgagactctgtccaaaaaaaaaaaaaaagaaaaatctggattggcagatattttctttcagcacttgaaaactgtcgtgtcacctccttctgacccccatgctttcagatacaaaatccgttggcattcatattgttgttcccataattaatgtgtcatttctctctagttgccttcaggatttttttgtctttactttgctgaagtttgactatgccatggcttggtgtagatttctttgagcttttcttctttggggtttgctcaagttcttgaatctgtaaatttatgtcttctgccaaatttgggaaactttcagccatatttcaagtactttttcagtctctttttctggaactttgatgacatgcatgatagatcatttattatggttccacaggcccctgaggctctgtttatctttttttaactctattttctgttgttcagatttgataatttctattgttctatttttagattcactaagtccttactctatcatctctattctgctattgagcccatccagtgagtttttcaaatttttgttattgtattttacagttctaaaatttctatttggttgctttttaaaaaattattcgctgagaatttcaatttttttatttgcttcaagtgtgtttgtaatggctaattgaggatgtttatgattgccacttaaaatctgtttcagataatttcaacatctgtgtcatctcagtgttggtatgtatcagttgtcttttctcattcaagctgaaatttccctggttcttggtttgacaagtgctctttttattgtcctggacactggaagaattatcttatgaatctccaaatcttatttaaatcttcttttttagcaggcctccactgacaccacactggtggagaaaggggcacatcacctggttactgccaggtcaaggtggcagtccagagatcctggcttcccactagggctttgctcacaggagaggggatttttttttttaattgtggtgcttggtttctgtcttttttagagtgaacctttcctgtcctttggctagaggtaacaggcttttttcagggcttttttgtgtgtgtctgtcacagttggcatttctggcttgctggcttctttagcacacaacattcaggatatagaggcagcaaaaagaaaactcagggtcayagtattcctcagttgccaaggttcctagtcagttggccttcttctctccacccttcagactcttatctttgttttatacataatattcggagtttttagttatactttgtgggaggaataagaagtgcatctattccatcttgtcaactagaagtcagcccatctggctgggcgcggtggctcacatctgtaatcctagcactttgggaggctgaggcgggctgatcacctggggtgaggagttcgataccagcctggccaacatggtgaaaccctgtctctactaaaaatacacaaattagctgggcgtggtggtgcacgcctgtaatcccagctactcrggaggctgaggcacgagaatcgcttgaacccaggaggcagagattgcagtgagccgagatcattgcactgcactccagcctgggtgacagagctagactctgtcaaaaaaaaaaaaaaaagtcggcccacctggaaattggtttttattaaagactgaaatttgacatggtggctctttatgtaagtaacctgttgtggaggctaaagtaactccatcttggatgctaatccactatgttgacttgtgattaaccctggttccaggaatgcctctgagatttccagttcatctattgttccttgtgttaagagcacatccttaccataaatcctgcccttagatcaaactcctactcattccctctgaaacacgtgtaccttttcctgtggtttataatccctgggtctgggggtggggggtaatggtgtggagatctatctgccttgcagctgctcaagaccatacttctgtccataagttccccgataaaatcaccctgtgatgacaagctggacttatctgcctccttctttggtttctcagccccttctgcatttgggggtcactttgcttatatagccctttcatgaaacatgtgtactagcaaaatactaaagatttatagaaaggggytgggcrcagtggctcatgccagtaatcctagcactttgggaggccaagatgggtggatcacttgaggtcaggagttcgagaccagcctggccaacacggtgaaaccccgtctctactaaaaatacaaaaaattagccaggtgtggtgctgcacacctgtagtcacagctactcaggaggctgaggcaggagaattgctggaactcaggaggtggaggctgcagtgagcttagatcatgccactgtactccagcctgggcaacagagtgagactctgtctcaaaaaaaaaaaaaaaaattatagaaaggcctcaaagcatttctgaaattagcttttccttaatgcttagtgtgaatctttattgcacattttaaatcatcttgaaactgcctttcccaaactttgcatcagtggttctattaagctgatggacagtttcactccattagaaaatgtcaaatttggtacacatccaggatcagaggaaggatcacaggagagcaagaaactggtgacaggactagttcagacacactagagtcagcccactttccactgctcacatagagtgacacaagcaatgtgtttaaatgaaagaagaaaaaagttcaggtgccacaaagatagaaagctggactcactgcctatctacagcctcagttttatagaatcgtcagttgctgttggcgttttgcacatatgaactggtacataagtgaagaatggatgggtacgtggttggtgcctaaaggtacggtttcaatcccagttcctcctacacactacccagaaggtcccagaaagccctgttctcctcagcaggcgctccacaacagcagctgcagaaagcgcagccatgctaacagaggcgcccccggagttttcccatcttcaccctcacccaacacctcttgggtcattttctcctggtctgtcttcacaagccagaaatggttgatactgattcggtatgggtttggaagattataggtttctgatttaaaaggccttatgtcatcagggtccaacagactttctttctggggatttctgtgttctgaagttcagacgtcctttgttccttcccttctaggtcagtcaccacgaacaggggcactcggcatgctgccccagcactggagaagcagcgctgtgggggcaatctgtcacactctcagagtctgggacttgacttgctaccaacaactgctgtgcaattctgctgagcaggaatatcatgagctgttcaataatgacggacgcattggttgagatgaagtttccagtaaggaagtgacagtgcaatgtggatatttatggctgtaaaataggaagagctttagttcccaggctgaacctgccactgctggagccatttcaacaaggcatcctcacaacaaagaagagatgtgatttggtaccatttcacaccagcaggtgtctggacgaaaacatcaatgtgaataagggccaagtgcagtcctgtcttgattaaattacttaataatattattaaataataataggtctgggcagtattgtttttaacctgactcatccagctgtccttcaaatagctccgtctccctctacccagaactgatttttaaaaagaagtaatttttctccctgggctgggaaaaccctaatgaactgaaacacacttttactttaaaatttttctrtctggcgtttttgtaatcatactattaaatgactctggagtcatgttaatgacaggatttgttttgtttggatgcagttcaattgcatggtttgggtaaaagctagcctacatacaaaggaatatgaagactgtggaagaaactgtatattgggtttaagaatttcagcaattatccggtaaaagaagaacttaagcattaagctgcaatgtcaaatccacttgcttcagtcttactagctgatgttgccaacagttggtgatgcctttttcagggttctacattcaaagcctgttaaagatggttacaggcaaggaggagtcacaggcagaggctaaagtatatctatcatcttttaaccctaatgcacattttagaaagtctcaaaaatctgttgctgtgatttttacatcttgtgttttttgagacagagtctcgctctgtcacccaggctggagtgcagtggcacgatcttggctcactgcaacaacttccacttcctgggttcaagtgattctcctgcctcagcctcctgagtagctgcgactacaggtgcatgccaccatgcctggctaatttttgtatttttagtagagacggggtttcaccatgttggcctggctggtcctgaactcttgacctcaggtgatccacccaccttggccttggcctcccaaaatgctgggattacaggtgtgagccactgtgcccagccctattttaaaactgaatttcttcaagcatctaaatcagaggctggcagaaactttttctgttaaggcccagatagtaaatagctgtttactttttatgggccatatgatctctgttgcaacgcctcagctttgtcattgtagcaggaaagcagccacagacagtaagcaaatgaatgagcctagtcatgccaataaaactttatttacaaaaaaaggcagtgggctggacttggttcaggagccagctgtagtttgccaaccccaggcctaaagaaagctggagaggaatagcttacacccagaaaagaacctctcagtgagggaaacagactaagaatagtatcacactacagccttctaccaacagatgatactttactttaaaatacaaaacaaaattagctcagccagttagttgttttattttgagttttgtttttttaaaaaaagaaaagctttgagaaaatgtgttaaatatcagtaaagggcaggaacacacatggctagctttacaatagcaatctaaacatacacaaaggcaaacattgagtaaaatgctagggaaagacggcactttgggggcctactgcagttttccttattgcacataaaggttgtggataacgccaagtctttaatttttcacagttatactttaatgtcattttatataacgtttatttatataacatactataatgttaattttataaaaccaccagtttgctactgttgaatggaaatagaagacaaaattctccccaattacactatgtaagctctctataaaaagttccctagaaggtcacatcattccatgttaaattcgtcctattctattttaaaagttgcttttcagctattaaatgaatctttatggccttctcatttaaccattttcatggacatagtacaactttccaagtaaaaagtaccagatgtattttatgtgaaaaacaaaaggacaacttaggaggagctggccctactatgaagtcacactttgaacgatcaatttcagtggtaaattcccaatccatagacttaacacccacacaactgaaaatcatccctctgcttctccaaagcccacaattggaataatcacaacacaagtcagcccctaaatgtccatgcagttaagtcatccagtaacacctgaattgtagccttttttaagtgcttgagacagcagatgttgaggtttccatgctgtttacaagtccttttctatctgagttcctccaacatatacaggcccagacaattttccactggccaagagctgactgtgacacttggtgattctgttaagccttttgaaaggtggtcatcagaaggagaaggtgacttctgctgtgtgcgctcctgtctgctttggaccttttcaaagggcagcacagcaggcagcccttccttctcatcttctccaaggctcaggtagcagaaaaccggctgcctgtgtgttccatatgggccacgactatagtataccctgcttacaaaaataagactaacatcaaaaactttggttttgctctttacaatttttgctagcactgggtgacaagatgtgtttaattttttaaaaatgtctatgaaaattgacactggaaaaaactgtttatctctaggtcttgttttgaaaggattgttgatgagtctacttgcttttcctagttaagacactagcaatggtttctacagtatttctctatatgttgttttcaggttttagaaagggggatgatcttttcaggtatcaaagtggtaaaagcagtattcagatgggttgtttctaaactacaactcttggccactagattcctttgacttactgtatcagaatgtagcagccgacactggcaatccagagtgtcagttaaagaacaacagaatagctcagaactcaatgataccagtctaatgtatatgaaagacttgttcctgaactaattaatctatagaatcaacatcaaaaggcagacaagaaacttgtcaagttccccacttttgaagtggaataagaagtcatatacttgtgagatcagcaggctgactttctagcagccctcattgcagataatctttcacaacagatggtaaaatcagctttctgatacactcttagaactcacaacgggtgcacagtaggtttccaagtgggtgattttcacctctgatgagatgctctaacaccctgccactgtttttccccctaagtgcatcagtggtgtttctacatttggaaattacttgttcacattaaacatctggtatgattacattaacttctactgcagacaaggacagggagagataggatgatgggatgacgtcaaacagaccaacagacctctattttggaaggaactgttagttctttgtcctagaccgaatcgttcatggatagctgagatacccttttgcatgttttctaaagagattccatttgtcagccaaaccacagaggacattttcgggtctagagaacacagcctgaagagatccttgctgtttgcttgatgaaacatttgatgtcgcagtgtgatttctgccttccaggcatcaatgcttatttgtctgatcaccccagtaaccaccctggatgctcggatccatatgcccttcctgtgattgtgtcctaggaagaaatgtggccttatttaaattccaaattttcttccctaggagagaaagttcaggtttctggtagttctcaaaaagtgtactaaaaggaatagcagctttcatcttctctctgtcagggctatacaaaagtgtgcatctccttaattacctgctacggaaaccaccaccatcaccatgtgatagcaaaggaccacaaccttctactttgctccagcagtaaatgggcccacccttattctgaggaatccagtgtggactcaggcatgaggataggtgaaggaaaagaaaatctgactccagaggggactattaatttaattccaggtgaaattaaaaaaaaaaaacaaaacagcttcccagaaaccttcatgcttgattagttagcagctcagttaagacaataccttccctttattccccacaagtgggaaccaagatgacaggtttttagttctccccatacataccccaagtcacccttctctttcctcgaaggctccaaggttttcgtgatcttttcagctgtactttatggagtatgttcttgagttctgcaaagattagcatcaaactctctcacagctgccctgtctgtattactgatcaatactcagttcgtttcacatgactaacaatttaaaaaaacaccttcatctgctgggccattctttaaaatcagattccaaatagtctagaggtctgctgcgagctctagactaaaggctcttgtcaatcctggctgcacatcaagaacactcctgaggttccaaacaaagcatggattccaggtcccacctgaagctactgaatctgaatctctgaggggagggcccttgcactgatttaaaaacaaaaactggccagatgatcctaattcacagccagggttgagaacctctgctctagaacatcggactcggctgaactgtcgtccccaccaacccagaacaaatacgtgtataagatggacttgggtttactctcttggaagaactttgtttatttggatgtaccattacttagcagtttcaatctgatcttatgccagactggcagcagatagttggccttgtgttgaatgatgcctgacacggcataggcaaaattcttctagatgtggaaccacttgacgaatggattcacattcccaggacccctggtaaggtcagggttattctccacatcttacaaacaaaaattaggaccaaaggtcaaaaattaggaccaaagtgccttactttgattcaccaaatatttgtaatcaaataaggacttagaacactggaaagcagttctgattccaaatggctgacagctcggggttagtgacaaaggcaagaaagggagaccagcctgcatttccagcttcctaacacacaaagaaaggccggggtagggttactgggcaaatgctgcaactagattctgggccctctcttccctgggtaggacttctgggtgggcctcctgccctatacaaaccatccccaacccaccttgtttacattggaactacactgtcgtagacagcaattcagggaagaggacaagccataattaggatttcctccctgtttcccctgtcatctccacacaggaaaaccctgatgggaagcccacccctctagttttggtcttggcaatctacatttccttgtatgtgagtagatcagaatcaaatgtttgcagtgaagactacaagaccctttggggataaacacaacactctatgaattgaactaagactaggaagggaaactgggtggttatttttcttccctaagagagtcatttcttgtaatcttgtaaaagctttctaaaaaaaactcaaaataatggccaggggcggtggctcacgcctgtaatcccagcactttgggaggcagaggcgggtggatcacgaggtcagcagatcgagaccatcctgcccaacatggtgaaactctgtctctactaaaaatataaaaaaattagctgggtgtggtggcatgtgcctgtaatcccagctactcgggaggctgaggtaggagaatcgcttgaacccaggaggtggagattgcagtgagccgaggtcatgccactgcactccagcctgggggatagagcgagactccatctaaaaacaaaacaaaacaaaacaaaaaacaaacaacaacaacacaacaacaaagccttgaggtgaacaaagaaccatcaccagggtgtgtctgttagttttttccctccaaaattaagtaagcaatataagataagcaaagctttataaagacccaaccaaagacccaagcagcctatctctccatctctgcaaaacaaaaacaaaaatgaaaacaaaacaagtcttgccttttagatttatatggcatgactggtcattactaagataactctgctaaataaaaaatcctgtgctggttctggactccagcacacatataatacaggcctctgccaggcctggtagctgctgtctgcaacctcaccccaggatataagaacttcccttccaggggctatgaaagctctttctctggctgtggggtgtaggtcttattcttaagtccttcactagcctagttgaccctgagggctcatgggtttggataggttgtttagcatttttcaaacttccaaagcccatggatgaccataaaatcaaaatggactttattgtagataaaaagg

SEQ ID NO: 93452 - DNA, 12415 bp, Homo sapiens
  misc_feature (1)...(12415): n = A,T,C or G
tttgctggtcaaattagatggagaaatacacggttcaaccaagcgtaaaatatttctttgtaattggacattcatgttgatggcaggtccctgagaagagagaacacagagcacagtgttttccaacccttccttctcctgagtatcacattttatggaaaaactggtccagtccagtttcctcatgatgtgcctacagaaaccaaggtccagaaaggcaaatgacatgcccaaggacaatcagctatgaggagcagggccaaaactggaatctgtctcctggtttccagtcaaaagctgtttccactttcccaccatgccaaataattaacagtgcaggtgcctccttgcacagaacagagtaatatcgataaatcaaaatgtcggttgcagactggttgttggaataagtaatctgaatgggcaagaatgatgagacagaagcaatccttcatagtatttctgctcaagtaagagctgctgacatattttaggtatgtagcctctctttgaagaacatctttttaccttcctctattcctgagacccctatagcatttgtggtgggatgaggcctgggggcttcaagcatggcacttggcaagatgcagagcagagagccagttctatggctgcacagaaagcgaacagtggtgatgactgtctcctctgccttctgagaagccaaagatgagaatatgacctgaagagctgacttggagtaccatcctgcaagattcattacatttaggtgtgaagtgttgctttgttttgtttttcattcacatctacagattggaaagagtttcttctcctttctcctcttgaaataatcactttcggccaggcactggggttcacgcctgtaatcccagcactgtgggaggacgggatgggcagatcacttgaggtcaggagggagaccagcctggacaacatggcgaaaccccatctctactaaaaataatacaaaaaattagccagatgtggtggcatgtgactgtagtcccagctactcgggaggctgaggcaggagaatcgcttgaacccgggaggtggaggtttcagtgagccaagatcacgccactgcactccagcctgggtgacagagcgagactgtctcaaggaaaagaaaaaaagaaaagaaaagaaagaaaaggaaaagaaaagaaagagaagagaagggaagagaaaagaaaagaaaaaagaaaagaaaagaaagaatcaattttaacataataaagcagagaagaaacctatgggattgttaatttgacttgtggacagtctgtgtatcttaacaattacacatcccgagggcagcctccttcccttcttttttttttttttttttgttttactttgttttgttttgttttgttttgttttgagatggagtttcgctcagtcgcccaggctggagtgcaatggcaccatctcaacctctgcctcactgcaacctctgcctcccgggttcaagcgattgtcccgcctcagcctagtggggtagctgagattacaggcacccgccaccatgcccaactaatttttgtatttttattagagatggggtttcatcatgttggccaggctggtcttgaactcctgacaggtgagccacctgcctcagcctcccaaagtgctgggattacaggcgtgagccactgtgcccggccccttttcttctgtaccctcagaatctaacttgtgaatagctagtcagaacttaagaactgagaaccagctaaagaaaatgaggttcttaggtaaggtacaaaagacgatcaaagattcaaaggccctgagagaagaggagaaacaggtgggccaacagaggtgggccacagccctgagagagtagacaatcccaaggtcagagaatggaggcagccaagagtaagtgaaatggggtggagggccgagcaagggagctgaagaaaggtggcacgcaaagactgtttgaggcctacgtgtacacacttgaatggctaacaaaataggccatttgggttacgaattgcatcgtcccttccttccaattatgaatcacagtgttagaatgacggtatcttgtcaaggaaatggtatgacagttttcagatactgcagtaatctcattcaatctgttccattctttgcttctactgcagccacttttcttcaaaatttaatagtaaaggtgtatgtgattggactgcaaggtaatcgtcaagggactcttagaaattctcctcagagataatataaaatagttgaccatgtcccaacagaaataccaaatttgaaaaagatgtgtggagaggaggatagtgagacaatctgaaaaataagctaacttaactgacaagtttcctgccctcaaagaaaagaagaaaaaaaaaatacacacacacacacacacacacacacacacacacatatatatatatatattccccatctaaaaagaacgtaatcccataatgtgaaaaccatccaacccacactgctagggtgaaggggaaacatattagcaaaaacgatacagaaaacgattctgaagtgctgactgttccatagagtaagtgaaagcagaaagcaattcaggtataattttcttgaacaggaaacaacagccaaattcttattcagagataatccggtctctacgaattccttctttcacaaaatctccttttccccatcttttaaattgggtgactgggaattatccttttggagaaactcagcaagatttctcggtttgcctttttacaaaggaagtcagctagaaaccgccccgtcactgacggggaggcaaaggactctcggcggccaggccctgaagccgcattggtgggtctccatttagtttgtcctttaaagtccggagaatgattattccataattctctcacctgattaattcttaactatgaacataattacactctccagaaggtaaatcggtcttataaatcagtcgtcgctgacagttcactatgcgcagcgcgatcgcccggggttggcgagctgagctgagggtgggtgtttgccaagtcgccggtcccctgcgtccccgcccgccggtcccttctccgacccgagacccccgcccgccgcagcccgactctggggcgtttgggaggtgggcctgaggtttgcctaggactcgagttcctttcaaaggaaggcgagagggagatggggagaaggagactcggagacttctctattaaagccgcgctgaactctagccttctggcaagccgcggcaagycgccaatttgaagtgtgtgagctttaatctgctcctagcctgatgggctcccgtgtccacagggagctgggaggcatccattacgccggaccaaggagatggagcgtctaggaaatatgttaatgccggagccctccccgccggcccgaacctgcccttgccagtctgacagcctcggagaaagtgacatttcgggagagtgtcactcctagcagggctcccaaaattcactcctattcgttgcattaaacgtttttttttaaagacttcaatgatccattcatttgctaaaaatgcgatgttctgtttgtttttttgtatttgtaagtccaggatgggtggtttttgtgcacagaaaaacccacttaacttagtaaacaatggcttttaaattaacacatgaaatattaaagttatacattttaaaatctagcttttcttaagcgtttgatttctacatataaatcttctattcatagtatagcacattcagcaacaattttttagggagattggctaatatttggtcctatttacaaactttttttaaacctcttcaaacattttaaacctgatttgtcaattgagtatatcctattacctatttaagtttctcaaagatctgatggacaaacttttctagatagtttagtataatagcttttacaaattaattacatggcatggtgaaccccaaattctattaaatgtccaaactgaatgtatcgttggtaagacgtgaactaaaatgacaagtatgaatcaattacacaattaacatgtttaactggaatgacagatttacctgttattctaatagatccaattctcttaaataccgtaatacttaaactatgaaatatactcatatttcttaataataaaatatcactactacatatttgatttccttaaatatttctatacttatttctaaatcttcctcaagctaacaaaacatctttttcattaagaaaaataaatgtagtttggtggttgtctttctaaaatggcctcagcttgctgagatttcttaaataacaaaaggataacagtcatacttaatggtctgcaatcctgatagaaaatagggagtgctatttatagtagctatagcaataattccaaaatctaaagaagatggcacgtagcccacgtcctttggtcttgaatcatagcattacctaattttcaaattagtttagtttgcatttacattcaaactgactataacactcaagtgaatactttcatatattttacttttaagttatatacgccttccagttgttaaaaagtttagcctaaaactacctccttacgtattttaagtttggcctaaatgtttctccatacatagtcaactgtaacctaagtggagatgtaagcagactgatacctactcttttggtaatcactgagtttcatccagtcaaaggtggccaactgttcaagcccatgttcaaataaggcaaatgcccagctgtgcccaatctggctgtttctatacctcagtgccattttctgtacctaactttcctttttctgttcaaaaatgttttttctgccacgtggtagcgccagagtctctctgaacctattctggttctggggctgtctgatatgggaattgttctctgctctattaaactattaaacttaatttgtccaaggtttttcttttaatgtagtctaaacctagagtttttaaaagacattttaaaaaggctttttaaaaaaatgatagagaacttcaaacatacacaaaataaacaacataatgagatcctgatttctccatgtgtcaatcactgagttccaacaaccatggtgaatcctgccccattcatacacttatccacttcccccctgctgctttattaggaagcaaatcttaggtaccctatccttttatctgcaaatgaacaatgagcactgcttcttaacacaatcagttaccatcaccacacctaagaaaattgacaaatttcttaggaagatatccagtgttgaaatttctgattctttcataaatgtgagaaaatttgttgtacagtttatttgaatcaggatctggacaaaacaaaaatccacaccttgaaatggctgatgttttttaaaatctcttttaatctgtaagaacctcctccaaccactttttcttgaatttatttattgaagaaatgaagggtttgtcctgtagagtttctctcattctagattttgctgattgaatcacattggggtagatttacatattcttcattctctatttggtacaaattacagttttcataaaactactttataaacattgtatccatccaaatagaagtgcacaatgcctacctccttgtccgtctctctctctgttcccctctctctctctcgatttctctctatgttactagcaaccactaatgaccagagcctggatccgttaattcttctgtgaaaaaaaattactcctcatccactatttggttacctagtggtatagttcgcataagagagcaatataagcctttaaattgttactttatttaccaattttcaaactattgactcagtacagtagcatcctccaatgatgatcagttaattttgtgtttgttttttcaatatgaatgaatgaatttaaaaataaaagacctgcacactgggccggacacacaggacgtgtttctggcagagctggctgtgatgcgtgctctgttccattcagcatgtctgtgtgtgcaggacctggctcgcttcatactgagatggctgagcagtcagacaagggcataaaatactacaccctgggagagattaagaagcacaatcacagcaaaagcacctgggtgatcttgcaccacaaggtatatgatgtgaccagattttttgatgagcatttctgtggggaagaagtcttcagggaacaagctgtaggtgatgctcctgaaaactgaggatatcatgcactctacggatgctagagaattgtccaaaacatatatcattgggggggctttatccagatgacagatcaatcacaaatctttcagaaaccctttttactactgttgattctcactctagttagtggactaattgggtgatcccggcyatctcagcactcaccgtagccctgagatatcacctctacatggccatatctcagaagcccatgaaagaaaagactgctttggacaaaggagaaaaaaaagccaatgttaactactttgactgagagaaaacttcacctgaaataataattttaatatgtccatttccctttcctctttcattaaaaacaaaagaaaaagaactgttttattctttctactcttgaataagtgtgccttcttactcgtcaactttattttgatctttcttcactacataatttacttattgtaagtatgatcttttaaaaatatatctggcttttaaaatatacaaaataaataaaaatgaaagagttacatagtcctgctttcaggtgacttgttctccagtgaaaaggcataacttcaagtttgtgcagcccaccggtctatgcttccaaagtccagattttaggaaatggttaacaggaagacatcgagggaaataaccttaatgaaactttcatatcttgtgctgtagaaaatttttagaaatatatttaagattgttgtgtttgggtaaataaatgacaatttcattggtgattttttatgtgtcaggattggctcaaagcattttaattgtattacacacattaactcatttaattcttatactgctgtatcatccccattttacagataaagataccaaggcacagtgtagttaaataatatggccactctcatctactatataagtagagaagctgagattaagattcagagcctgagcccatcacaacatgttttgctattgaaacttacttcagtgtagaaatttcaaaaatgaaataattcatctatgttctgaatagcaaggaacttaaatccctgcacaacattgaaaaaacaaataaagcaattcacacagaccaagtaccagagcaatcaaagaaattatttatagcaaaagagaaaagaggatattatttagaaatgaaatatggaactctgactttcgaaggtacagaactaaaacattaaggacattctgaactcaaagacagttggaaaccagcaaggtagggtggaaagttcagtcagaatcaaacatacccagatacaaatccagccttaaccacttactagcaatgcatctttggctcttactaacatccctgaaacctgttttctttccctgtaaaatgagaaacaaaataatcttaaatcttaatatcagtctcttcagttgattagtaaattgctaaatggcttcctataggcattcaatgaatggtcgtttctgattctttaacttattcagtgttttaatatttcattttatatatttttcagttaaccactttttttaaactcttccgtgtaaaattaaatgaacttgaatgagtccctggatgtaagctttgcttcttttaaccaaagaataattattttagtcatcttaacctgggctaattcttttaatttctgctgaatctcctaggaaatacataggggaaaaatactaggcaatataactttcattagatgacaatttggtgtgactatagggagtactgagcaaagggggaaagctaattgtatagagtagagaagtctaattcagagaaaagaggcctgtttcgagttccttcatcaaaattatgcagtgatacaagaagaaacttccctatatatcaaaacagaaaaaatggaaatgtaagttttgacacagtcaataacagagtcaccaaattcactggccagtggtacacatgtgcaatttatatttcttaaatcgcatacacactgctattgtttggatgtacctgtccctccaaaattcctgtgttggaacctgatatccaatgtgatagtattaagaggtggggactttggggaagtgataaagtcatgatggcttcctcctcctgtatggattagtgctcttataacagaggttgaagggagcacccccctgctcctttacccacaccttccaccatgtaaagatgcagcaagagaaaccatccagaagcagaaagcagccttcaccagacactgaatctactggcagcttgatcttggacttcccagcctgcagaactgtgagaaataaatttatattgcttacaaattatccagtcttagtgttttgttttagtagcatgaatgggctgagatacactcagatgcacacacacatggcatactcatttgcagttctctatcacctaagtagtggctagtattaaaatgctgaccctttgctccctgtgctagtcctacacacttaccataggccactggtcacaatagcagtccttaatgcattttcaagccaaacgtggcaagtccttaatgcactttcaagccaaaaatccaggatatacaaacactggggcacaaaataacgggatgagaccaggaaggccattgtgcccattaaagataataataataatttgctcaaaacactcaggtgcaagaaatgacacatcttctctattaaaaaaaaaaaaaatcaaactttgtgtgactctctgcttcttgttgctcagttacaagatgcctaattcctgccagaaagcttgaagagaaggtttttattctgaaggccaggatttctactgagattccaattgtccatgtcaataatgacaatggtcaacttaaatgaaggagactctactccctatttgtctagtttgggctgaggagatttgccattattcattcatttaatgaatatttatggagcacatacgatgtgctaggcaccatcttggagacgagtatttaataaaacagacaaaaatcccttctcccatagagattgtctttattctctatttccctctgttccccccaccccaaccctgcacctctagaaattaagtaaagaataatcaatgctaaggggaagtagtgaagcaaggaagacacacagagtcagagtgagaggttgacattttagaaagaatggccggggaaggcctcatgcagcaggtaaataagactgaaggaagccagggaattagccatgtggctctaggggaagtgcagcctacatagaagaagcatagagctctaaggtcatgaagagggggtaagcctggctgtcaagtacttgggaggcgggtgcagctgaagggagtgaaagaggggaaaagtgatagacggtaaaatcagattttaaaggcactggataagagagagtcatgcagtctctaggcagggacccttaaggctctggaatgaaagtgggatgcaaatctcggtcacccactcactctccacccccaacagtctccccattccagcagttctgcctgaagctctccttctttctcatgggtcagcttctctactcaaagtacccagtccattcttgctcccacagggaaggccgggttcaatctcagttaatcaggctagaaacctaaataaatcctctgtgaagtgccagactcctctgttttctgcctgaagggaaaaggccatttaaaatggcccaaagcaaaaaagattagatacccagacctaatctcaaaggaaaaggaaggggaggtaaacattactctctatggaagtgagaacacagaaatcagcatctcaccaaattattctagtgccctgggtacatggcggactctgaggacagtgtctgctatatagcatggcactgaccatggcctatagtaattactgatttactctctatgtcaccatctttgaactgtcaactctatgggggaaaagactgagctttatttaattttccatctctcactgctatcacataacttgaaaggtcagtgctcaccaaatgattgttaaataagtgaaataaatgaatgacaggaataataaataaatattcatgtgctttgtaaaagaattgattgctcgtgaaagccaatgcaagagagagggcagcctgatatggcacagcccagcttgaatgaccacctccaaagtgtcataaggggtactgtgtcagaaactactgattgttccccagtatccattttcttcttcttctaaagtcatataatttttagcagggcccaggaacactcagaaaaaaaaaatattctcggcatccctggcatcttagtgtggcctgtggccatgttctggccaacaggatatttggacggatatgaaaattatgtgtgtccttcaaggaaggaaagtgtagcacttcacagtggctgggatgaggatatgccatgagccactttggaccatgctgaatgaacagtaccctatggctgacaaaccaaagggagaggagactgtatctctaatacagtgaagtctttaaaccagcattggacttcttatgtctagcctgtaaaaagtcattattatgttgggtctcaattacagaaagtgagtccatatccttatgaacattgatgattattcagtttcctacttcattaagattgacccccccgcccccgacacacacaagcagtatagagcttcttgctaaggtcagctgaaaataaacattgataatgtttaaaagaatgttaaagccatcaaaatgaataatgatttagaagagattctgatgctttcatctttaatttgccacaggagagctggaaaaatataaactctgagttctgcctcatatgaattaaaatacactaccagttatacattctgtaattcttcttcaatttggcaagatttgttgagttcataaaaaacaatgtccatttccccactctgcctcctatttgctttatattaaacaggcctgtggatttgtactgacacagcaaacaaaggcaaggtcaaatattatgtggtaaacttaatcagtatggaaaaccagggtaactctgagtctggtagattccatagtctaaatatttttcccaatttatttctcctctgccaccccactgccactgcctcttagtttcttgaaagtaaatttattgcctctaatcccagcaccttccaattaagccactgaaaataagagtgctttttacaaaatgaaaacccgacaatatacttttgctgctcaaacatattctaaagatccctaaaatcttcaagatagggctccaaatccagaaagaacagacttttgtgatctggtctctgtcccctcacctcctaccctattgaactactcagtattccacaaatttcttacccttgttgccatcttcatgtttttatgttgctcttccaattgacatgagcagtatctctcccagtgtgtcttacgataatttcctattcttcatccccttaaaaatgtttctcagattttcccatggtaattcttcttgcctgctcccaacgcatcctctcaatacctctataatgggatttaaactgtactgtttgtttcctcttcactagctttcacttgctcttgaaggaacgtgtcataagtctatatctctccatctctggcatctcncaccctgcctgccatagagtaaccactaggtaaatgtcagataaatgaatgaaatctaattatacaaccctttccccatttcaaaaatatcttccattttttaagtttttattttgacttgaaatatctggaaaattgacttaactctcccttttaactcaacactgttaagtcaaatcagggcagttccagaaaggacagaaggcatctacaaagggcccctgccaacactgatcacttaaccaactgagaagggtgcctgtttgaaggcagagccattgcctttactattatagaaacccaaattggaacagaaggatttatgcgagctcagaattcataataatgactgttaataacacagcagaggaatacaatcaaaattgtcatagttgcatgcaaaataacaactttaattggcaaaattaaacttctaatagccaaagctctatcaaggtggctgaactccttttggagccaaagtgacttggataatagaaactacatctgatgtattttaaggtcttctgttaccatatgtgctccactcactgtgacagatgggtattgatatttttttctcaactgcacaaaagctagctg

SEQ ID NO: 93453 - DNA, 12486 bp, Homo sapiens
tcctacagtattattagttaaggcattcaccaggaatcaggccttcttgggaattctgtattccaaaggctgcaaacagacagacagcctgcatgtagtggctcactcctgtaattccagtactttgggaggcggaggcaggggattacttaagtccaggagttcgagaccagcctaaacaacatggtgaaaccccatctctacaaaaaaaaaaaaatacaaaatttagctgggcacagtggcatgtgcctgtagtcccagttacttgggaggctaaggtgggaggttcacctgggcccgcggaggtggaggcttcagtgagctgtgattgtgccaatgcaccactccagcctgggcatagagtgagaccctgtctgaaaaagagagagagagagagagagagaaacttgaaggataaaggagactgtaatgccatattttgaaacctggcatcttgatcagatctcatcacagggctggtagccatcacacacagcagtcagtagtgccggtgagttttattgtctttgtgcagtggtgaatccctcagtatgtgcagctgtttagcatggtagctattctagttccaccatgagctagctctgtgatctcaggaatgtttcttgacctctttacctcagtatcctcatctccaaatagagataataaaaatatcaacctttttgcctttctttgactataaaatcaaataaaacatgtaaaacaaagacttcaaaaatactagctgatattatcatgacatacataatagcattgcaaatagtgacaaatttagagaattttttttgtctaagaatctcatagcatcccttcagattagcagacaccttcctagaaatttcaaaggtaaagttggaagtcatggaattatatgtgcaagaagctgcatctgttggcaaatccatatcccaggaattaaacccagtcatccartatcaagaagagccatttggcatcttgttttttgccgtgtaagctgaggaatcactggagactggtcatctcagggagaaagtaagcccagtgctaagtaactcgggattaaaagaccatcgatagcttgtgacaggcgcttcctgagaaatgcatcctggtcaaatagcagcaatcattaaatatatgaggatcagtcaatttaatctgtgcttttcatatggattgattgggttagcaaagtaacagagccaggagacaattgacattttcacatccttttcagacatgctgggagggaagagaagggggcagggagacttggaaagggaacctgcccccacccctcacctcttgtggtttccacctgtgccttgctttaaacaatctagaagctcagagggccacgatcagggggaggttcaaaggcacagacaatgaagctggtgcacaagtagctcctccttgagtcctgaccatggccttttagcaatttcctctcctttccttccactccccaccaagaccaatttgctcaaatcccaaattacaagtggaaagaggccactgagccctaaagtcagtggccctaaagagccctctccacctgggtatatagcaaaggaaataagaaatcaatgttagcttgaaatagtcaatggagtcctgccatgccaaagaaaggtttctctaactggaacatgtccccagaagttgaagggtgagacagcttccttgagaaaggcctggtggggtgtggagagaggtcagagtactgtaaggcaagactccatccattccatcagccaccttccttcaccgccatttggggtaaatacaaaactttgctgccaggcgcggtggctcatgcctataatcccagaactttgggaggctgaggtggatggattacctgaggtcagaagtttgagaccagcctggccaacatggtgaaaccccatctctactaaaaatacaaatattagcctggcgtggtggtgggcgcctgcaatcccagctacttgggaggctgaggcaggagaattgcttgaacctgggaggcagaggttggaggttgtggtgaactgagttcacaccacagcactccagcctgggtaacagagtgaaactctgtttcaaaaaaaaaaaaaaagccaaaaaaaaacttcgcttcttggggtacaacgtacctttggcttccatagcacccaaatttgtcacagttggagagggaggcaatgatttttgtgctctgagccatgtccccttggcacacctgatttcagcactggggtggtagacagttccacatccaatgccagtggaccagtggcctctctccaaacctaaggccaccctccaccaatggacgtgggaatgtgcatataatcctactttcattccgtgggcaggatagtactaaggtgaattctgtgttattcttcaaactcatgcagtcaccaaatcactttttctttcccctccttcccttttctgttctcccttctccttcattcctgcttcctgggatcatcgctcaacaaaatgcctgcacctcagtccttgtcttaggttctgctttgggagaacccaaactaggacccatggaagacaaaagaccaggagcccctccaagggcacgcacttcagagttgacagatacctggttggccctaaatcaagctagggttgtgctgtgccctcaacatgccccacacatcacaggtagacttcactccccagaaggtgttgctctgaggctgtgccctgtttccttcctgtggtgggggtggcctgaaggaatgatccagaaatttctggagacagctcattggtacaagcacagcccttggacatatgacattctaatttgagcctcatgaccatctcagggtgcagggcaggggactaccctcattcccagaggagcaaaactgaaagtattcttgtaaagagtttcttgaaataggtttgattgattctttaataaagttttcaacaaacacatgccagtttggcattttctaattcttttacataataaatccttgcaatatcccatctttggggcatgtggtaataacacattttatttcacctcttctagtccagtattttttaaagcatgacatattttagatgatactgtgggacattacttaataaacttgaatcacacagtaaaaaaaaaaaattcctttttatgttttcttccaataatataaaaacaagcagaaagcctcaatttggtgctaatatatctttagcacctctccaaaatttgatgctctttctgtttaaaaaggagagagtaggcctcaggtgagcaaccatatctggctagaattttaggatgatgttcatggagttaattttcaggtttgcatctttgtatagcgaaagaaggtcaacttccatttatggaagtgatgtaagcattttcttttgaataatgcattaaagcaaaaaaaatggagtcagttaaaaatatcaagtcattgatcatggtaaaatttatgaatgctgaggagaatgcctgaagtctagaaatcgttgttgtaagccattcatttctccacttaggctaaccctcctctgcttacgtagtcagttcccttatttgatcattcaaatggaaaaccttccactaaaaggaagaaaccatctggaaaaggatcccagagatctgttgtaatcttgataaggtccttccccttcctggaactcagcttctccatttttaaagtgggtggtggtaggatgaataagacaatctctaataacccttgaaactctgatgttctaggtttcaaatgtggataactcccaagtttggaccttttgccctgacttctcctgcaatggagatgttggtaccaaattctggtagctggatctgaaggaaaaaattaatcgcgttgggacaacatgcaagccctttaccgtggtctgcaagatctgccactatctgtcttctgtttgcaatttctctattgacatctgttgccgtctcgcacctcacccctatctgttacctggctcatttctcctcatcctttaagattcatctaaggtatcacctcttccaggaagctttctttgatcaacttacccattgccagtctgagataggcatggctttcttctgagctctgtcatcacctggctttggcttgcatcctgtcgcatcatagataagtgtccatgtcccccaccggactgccagcttctttgtgtgctaagtgtccagcacagggactggcatagagtaggtgttcaataaatgtaggatccagcctgggcaacatagggagaccccatctatacaaaaactaaaataaattagccaggtgtggtggtggagcctgtggctccagctatacagaaggatggcttgagcctgggagttcaagggtgcagtgagccatgactgcacgactgcactccaacctaggtgacagagcaagaccccatctctaaaaaaatcaaataaaaatatgatcaatgcatgaatgattccatttccaatttatctcataactttgtaagtctatcacttagtatacagaattctttcagttcactccgtggtcttcctcttcatgtcttgacattttttcacctgttacctgatgaggacaaggttactgtgtcatctacatcaatccagttccttccaggaggctcgaaacttctgcaggacagagattgcctcccacttccctactccccgcttgctaggaaaaccataggcactcatgagtaactataattgtccagagagacacaaactcctcattaacacaaatggaatgtcctccaggcccctgacactcccccgtttctattttgtacctttctaagtcaggcccattctgctgctcctaagtcatagcctctatgagctatagtatgccaaagtaccagatacaattatatatgggggaaagaaatttctattttkgtctcaagaaaattatgtgattttgcttaagttcaattttaaaacatggaatatgactgaacttaatgttagtacttaagaaaaatgttcacggtaattacagatgaagatacatatctataatttatttcaaatttagtaatacaaaaaaattctggatcctaacataactatttatagcttggccaggagaactctaaggataccagttatttcaccagaataggttatttttcatgtatcttatttaagcaataatgcatgacagagcatgaattatggcatattaattctcacctagtgtgctattaggctaacgttgatggctgagagctgtcagtgcaactaggcatgaattactatctaataattcccctgctgaaatgtcttattgagattatagcattttattagtaaaggttattcytttaaaaatgtttttgtatgctaattgagaacagggggctcaggaagggaaaagcttctcggctttccccagtagccatttctgaaacttctctttgaggtccccaacacttcacccttgttgacacacaaatatcatcttttggaagttttcttagacacttggcacagaggagcccctcagcagttgggaatctggacgcaataacttgctttggccagagatttcattcgatgaaattcaaatgggccttgcaaatgtgagtctggccccgtgaggtgctaagggagaaggcagcatgctgaaaattcttccagcaccagcggggaggccactggtgaatatggcaaggacagtgcaaggttggagtttgagacagagggttcaaatcctggctgtagcacttgctagctgcaactcttgggcaaagtcctttaaccttctctggctcacagtttccttctaatatagtgggcattctccccacctcctgagcctgatgcaatacagaagtgtccactgcctgcagcccctctccttacctacctgttcctatattgaagccaaagtgatctgtgttacaggctcatcatttgaaagtcagcatgtgctgccatctcctgcagtgtctcctgtgtccctcacacctctcagagcccagaccagagtgtggcccctggagtcataatgatgaaggtcatgtacatgttgaagggccagagcccggtgcagggcaccatccactttgagcagaaggaaaatgaaccatttatggtgtcagaatgcattacaggattgactgaacgccagcacagattccatgttcatcagtttggagataatacaccaggctgtaccagggcagttccttactttaatcctttaaccaaaaaccacagtgggccaaggatcaagagaggcaggttggagacctgggwaatgtggccgctggcaaagatgtgtcgccaacatgtctgttgaagattctctggtctcactctcaggacactattccatcactgcccacacaatggtgtccatgacaaaccagatgacttgggcaaaggtgaaaatgaagaaagtacaaacacaggaaatgctagaagttgtttggtttgtggtgtaattgggattgcccaataaacattctcttaaatgtggtctgagttccattaactcatctattatcctgctagctgtagagatgaaatttgataaacattaaacactgaaatctttattttttattttattttatttttttttgtggcagagtctcactctgtagcccaggttggagtgcagtggcatgatctcggctcactgcaagctccacctcccaggttcacgccattctcctgcctcagcctcctgagtagctgggactacaggtgcctgccaccacgcccggctaatttttttgaaattttttagtagagacggggtttcaccgtgttagccaggatggtctcgatctcctgacctcatgatctgcctgcctcagcctcccaaagtgctgggtttacaggcgtgagccactgtgcccggcctgaaatctttaaaagaaagtaaaaaactcagcatggcttctctcctgcccctggcgtagagattaacagtcttatgctggcttctatttttaaatttttaaaaaataattccaattaattaattaatttagagacagggtctcactctgttgcccaggctgaagtacagtggcacaatcatggctcactgcagcttcaacttcctggactcaagagatcctctttccttggcctcttgagtagctgggaccacaggcacacaccaccatgcccagccaatttttgtattttttgtagagatggggttttgccatgtttcccaggctggtcttgaactcctgagctcaagtgatcttctcaccttggcctcccaaaatgctgagattataggcatgagacaccgcacctggcccatatgctggccgtgccttattgggatgagggctattgtggtctgggttctggttcctcgggcttctttctgctcttccattaggttaggattcccctgcccagggactgtcaccacttcctaacccctcctccactcttccttcatgttagcctgtcactagttaagtctttcacacaattcagatctcagctaaactagagaagccttctctaaatctatgcagtaggcgttctggatctcctccttctaggcgcatgggggattgcccattcccattctccttcaagttgggtgtggccatgtgacttcaactgggtatgaaatgtggacagagtgatgtgtgttgcctataggaagaaacatgcttttatttcccctgtgactgtggaagcagggttgagatgaagcccctctcattctgtttctgagtgaacgtaagaagcagaatgtcccttctgacctacctgagagaaataaatagctcctattaaccccatgaggattgagggctatttgttacacagcaaaacctaacctaacctgcctgatacacccaccctaccttaatcggtccaccctctcctcatgcttgggcaagtccttatgtaacaccttggagtctgtctccacattacttaccatgactataaatagttttgtgtaattattttcttagtgtctattagctccaccagtgtttcatagttcaacagattcaaatttctgatgcataggtcaaagatgactcctaccctctgagcaatatactctgtctcaagtttgctgtgtgaccttgagcaagagtcttctgctctctgggccttggcttcctcatttgttaagtgaaggtaatcttttctggtaccttccatatgtggggttgggatataatagtaaagtatgtatttctgtattaataagttgcacaaatacatcctgttgagcaggaaatcagaatcttcacactggggtgaagattcagtacccaagtcctgaaagctgcatggcagctggcatggcaattcccacttagaaacctctttgtagtgtccttaggcaatgtcaaccctaggacggcccccactgaggacaagaataaaaacacattttctcagagaagctggtgagcatcctttctgatttgaaatatatgagggttgcttcgtacaacacaaaaatgagactgggaaacaataattttgtatccataggctactggcaagagagaggcttatctggtctttggagctcaagaaaccttctcactccctccctccaaaacaaaagagagtctatgagaacagaaccagtgaagttgctcacatattacaaaatcaatgcccatcagtgccgagctgcttggctggcccacctgtgaacaaatgtgccagagcagacactgcccaacatccacataagcactgcttcgctctctgaacagtttttacagccataattaggttttgaagggatccaggagagcccttcacaagggaacaaccaaactaaaaggccaaggagaaatcatatcctgagccctcttagtgggacaacctgtctctcaaatgacaatttttccgtggaggcatggcctcaggggaggggtggccgacaacacaatgaggtctccaataaatccttgagagcctagcatttcgagactctccactgtagcttgggattctcacgtgacttctggtttgactctgaagctgcttgtgtctatgtgtactcctaaatacagaaagaatccaaattttctttctggaagtctaggggcagacaggaatctgagcttcaccctccttcctttctgaccccttgtggaaagctggcttctagtctatgacaaggctgaggggtacaagtgatgcatccaaatgttcttttaacccttagtgggccccaggtctccacatgtcagggaggatttacttcagtttcaatctttgtccaaagtccccatttctgtctctgccaggagatagcctcagagatcagcccagagttaataaacaagctgcaggcatcatttgcaaaagaaaccagaggccaagaattactgcatggcaaaggtggtcacttcttgatgacctcatctaccctctgtacaagatatgtatgttatctccttaggaagaaagccacctgttagcgagaaccgtgccctgcccatgtgtacctgctcagaggctgagttctgagaaccatgtgattgagaagagactgaagagcaagaacccattgtagagataggattactgaggcaagaggagcaactaactgtgatcaaagggaatcaaggcctctcgattttctctgtgggttacccactaaaccagaacacatgcatcagaacctcatggtgcttgttaaaatgcatattcccaggccctgtgccaagatccaccacaacagaagctctggagctggggctctggaatctgcagttctagcaatttggaaatcaggagcctagattcatgctttctcacacgccctcagccaacatgatactgatgagccatgaaatccaagaatctctacagtaaaacttaattcctcccatgtctctttaaagttaccttaaaaggaggcagatttgaaagtcgacaaagacagcgcattagcaagagctaaactggcccaatggacaaatacaagtttctaaaagtccctttcttctgaatagtatttatcgggtggttgtggttgctgttattaaaaatcccttctctatgcacttgtgcataatccagcctatttctgaagccgtccaaaggaatctgaaccaggtgtcaccaattttggaccagcctcagagaaaagtagtgtggagacaatgtcaggtctccagtcccaggactgtacctctctccaggccatgaatttcaatttcttcctcctcttcctctggaagtgaagttcttccctgcccttgcctcctcggaggtacacttcccctctcagtaagcagctgcgcccttcttggcagctgctgcagattagtaaattacaagttcgagattaaaaaagaaatgactaaagaataaaacctttagtctggcgatttgaagtcagactgccacaatgaacacctgttgagaaagaccattattagaaactggaggctctgggtgaaaagatcactgtgaattaattttgattgcctcacgaaactctgcataacaaatgatctccaaagggggtgtcattggacttgcatttgaagggggtgggggggagattttgtttcgagcaaggtaatataagctctaccatgacattaaaatccaccattggttgcacttgtctgtatccctctgttgaaacagattgtgcatgctaaggttaccatgtattatgcttctggggaaaaaagagaaacaattgatatcaaaatcttttaaaaaggttagttgagaaagcatgaggtcagagactcatgactcccaaattgttaaatcgtttatttatgtctgtgtctatgtaaatggagatttgggtgtgctcttggtgatttaacagcccttgttttatttttttaaccatatacacacacacacacacacacacacacacacactgcacacctctataattttttttgtaagggaagaatagagtgaaaaatatgttaagaaatggatttgcttgcagttggatgacctttgtactttgtaatgtcatcagaaatgagaaaaaggcgtgagagatcacaaggtactgtggaatagtrgggctgggtgggtgatggggggaggatacactgaatattaagtagtttcattctttcctgaaaagaaagagactccaactaaaatatgccggcgtcctacctgtctgtcagcccttgattaaatmtaaaagcaggcatcccatctgtttgcccaaatgaaaagtgtaatattctactaactactttatattattactcaacttcagagtttcctgcaaaatgatcctcagttcatctgaagtttatctggctcacaaaaagaagctccagaaagctttgtgcttttaagctaataagcagtatacccagctgactctgtggctgaattttcaacacttggccattaatatcacatgaattttcatagccgtggacttccatttgttatgagacataaaacctggaagcactcggagagccatggataactatgaatataagcaaaatcttaatcctctgccccagtcagactcttcccaatagtgagagtgtggaagttatacaactgtgttgggttatgtaacaatatttccctgaccaagcatatcattttattacatgattcataatttgttctttcaaatgtgttgggacttagccccaacgtccgagcagaacacatgcaagagcccccatccccaaacctccaaggggcaccaactctcacaaagttcgaagatgcttctggtgcctgcttttgtttctaggtcatcagaaagatttggggaagcttgctgtgagcggagcctacttgggttgcctacaaatgctctctctccacgagcaaacgcttttaaaaagaattccaatttctgcacgatttggaaaatctctggggggttccttggagatattagataattgaatacagctttctcccattggaaaaaaaatcctcacatccaacaacatccccctaactcccaacgtcccttagcacaccagtcaattttatgacaaaattaatctgcagcgtgacttgtggagccccagagggaggtcacggaggccggtaaatatgtaaacgtgggtttttcggtttccgtttcgcatgaatacaaaataaactgcggccctgcccacgctggaaagttcttccttaaagttaataaaatctgtcaacttccataaaggccgagagaaagggggtgcacaggtgcagacgttcgggctgaggctcgagaagtcgaggcagctaataaaaagccctgggcaccgcgcgcctccttccccatcaattcccatcaagcgttattagagtcatctgccgtctccgaggtgcgtcccccgcgctcgccccgcagaagcgacaatgacatttggctgcgctgcaggtgcggctgtgtgtggccgcgcggccggagtggggccgcctttgtggcgctcgggtcctttgatctgggccacaaagggccgagaagctgcagcccccggctt

SEQ ID NO: 93454 - DNA, 13011 bp, Homo sapiens
agtgaggtgtggaagccaggaaaaagagatgaggtcagaaagcaatcatgtgggatcttgaggataaccataaagccattagcttctactctgcatatactagaaattgttgagtataggcatgatataacttaatttacattttataattacaaagtagataccaaaatgccccattgtgttcataagaaacgggtcgtttactacaggtgccacaaagcaataagaaaaatgattcctagtgcacatcatgttgaagaaatgaactgataaaattaaataccaaagaagtaaataagctctataataaaaactataaaacactttgatgaaagaaattgaagaggaaaccaaaatgtaaagatgttcaatgttcacagattagaaagatcagtattgttaaaatctccacaatatccaaagcaatctaaagattgaatgcaatccctatcaataatacttttcaaaaaaatagatagaccccatcctaaaatttatatggaaccacaaaagacccagaatagctaaagctgtcttaagtaaaaagaacaaaactagtagaatcacattatttgacttcaaattatactaaagagctatagtacccaaaacagcatggtacttgcatgaaaacagacacatagaccaatggaacagaacacagacccaggaacaaacccacacacgtacagtgaactgattttcaacaaaggtgccaagaacatacactggggaaaagacagtctcttcaattaatgttgctggggaaactggacaaccatatgcagaagaatcaaactagactcctatctcttgccatatacaaaagtcaaatcaaaatgattaaagacttaaatgtaagaccttgtattagttcattttcatgccactgataaagacatgcccgagactgggcaatttacaaaagaaagaggcttaagtggactcacagatccaagtggattggtagacctcacaatcatagtggaatgcaaggagaagccagtcacatcttatgtggatggcagcaggcaaaaaaaaaaaaaaaagcttgtgtaggacaactcccatttttaaaaccatcagatctcatgagacccattccctatcaagagaacagcatgggaaagaactgctgccacaattcaatcatctcccatcgtgtctcttccacaacacttgggaattacgggagctacaagatgagatgtgggtggggacacagagccaaaccatatctttccacttctggcccctcccaaatctcgtatcttcacatttcagaacttatcatgtcttcccaacagtcccccaaagtcttaactcatttcagcattaactcaaaagtccacagtccaaagtcttatctgagacaaggcaaataccttccactatgagcctgtaaaatcaaaagcaagttccttacttcctagatacaatgacggtacaggcattggataaattcagccattccaaatgggagaaattggccaaaaccaaggggctacaggccccatgcaagtctgaaatccagcagggaagtcaaatcttaaagctccaaaatgatctcctttgactccatgtctcacatctaggtcgtgctgatgcaagaggtaggttcccatagtcttgggcagctctgcccctgtggctttgcagggtacagcctccctcccggctgccttcatgggctggccttgagtgcgtgcagctttttccagcgcagggtgcaagctgtcagtggatctaccattctggggtctggaggacagtggccctcttctcacggctccaccaggcagtgccccagtaggaactctgtgtgggaggtcccaccccacatttccctctgccctgccctaacagaggttatccattaggacactgcccctacagcaaactcctgcctgggcatccaggtgtttccgtacatcttctgaaatctaggcagaggttcccaaacctcaattcttgacttctgtgaactggcaggctcaacaccacatggaagctgccaaggcttgaggcttgcaccttctgaagccatagcctgagctctatattggcccctttcagccctggctgggcagctgggacacagggcaccaagtccctaggcttcacacagcttgaggatcctgggcccagcccactaaactactttttcctactaggcctctgggcttgtgatgggaggggctgcagtgaaggcctctgacatgccctggagacattttccccattgtcttggggattaacgttgactctgtgttacttatgcaaatttttgcagttggcttggctttctcctcagaaaataagattttcttttctatggcattgtcaggctacaaatttttcaaacttttatgctctgcttcccttataaaactgcctttaaccgcacctaaagtcacatcttgaatgctttgctgcttagaaatttcttctgccagataccttaaatcatctctctcaagttcaaagttccacaaatctctaaggtaggggcaaaatgctggcagtttctttgctaaaacataataagagtcacctttgctccagttcccaacaaattcctcatctccatcggagaccacctcagcctggaccttattgttcatatcactgtcagaatcttagtcaaagccattcaacaagtctctaggaagttccaaactttcccatatttttctctcctcttctgagccctccaaactgttctaactgcctgttacccagttccaaagtcgcttccacattttcagtatcttttcagcagcccccactcccattaccaatttactgtattagttcattttcacactgctgataaagacatgccagagaggcagtttacaaaagaaaaaggcttaattggactcacagttccacatggctggagagggcctcacaatcatggcggaatgcaaggaggagcaagtcacatcttatgtggatggcggcaggcaaaaaaagagcttgtgcaggaaaattcccctttttaaaaccatcagatctcatgagacccattcactctcaggagaacagcatgggtaatacccacccccataactcagtcatctcccaccaggtcccttccgaaacacgtgggaattatgagagctacaagatgagatttgggtgggaacataragccaaaccatatcagacctcaaatcgtgaaactaccacctgaaaacattggggaaactctccatgacattgtctggggcaaaattttcttgagtaataccccaaaacacaggccaccaaagcaaaaatggacaaatggggtcaatatcaagttaaacaacttctgcacagcaaaggaaacaatcaacaaactgaagagaaagctcacagaatgggagaaaatatttgccaatcgccccagtgacaagagattaataaccagaacatataagaagctcaaacaactctataggaaaaaaatctaataatccaatttagaaatgggcaagcaatttgaatagacgtatctcaaaagacatacaaacggcaaacagccatattaaaaggcgcccagcatcttgatcattacagaaatgcaaatcaaaactacaatgagatatcacctcaccacagctaaaatagcttacatcaacaagacaggcaataactaatgctggcaaggatgtggagaaaagggaacccttgtgtgctgttggtgagaatgtaaattggtacaactgctatgtagaacagtttagagtttcctcaaaaaaaaaaaaaaaaaaactaaaaattgagttaccatttgatcccacaagcccactgctgggtatgtacccaaaagaaaggtaatcagtatatagaagcaatatctgagctcctacgttagttgcagcactgttcacaatacccaagatttggaagcaacctaaatgtccatcaacagatgaacagataaagaaaatgtgatacatatacacaatggagtactattcagccataaaaaaagaatgacaccctgtcatttgcaacaacatggatggaactggaggtcactatgttaggtgaaataagccaggcacagaaagacaaacattacatgttctcacttatttgtgggatctaaaaatcaactcattgatgtagaaaatagagtgatggttaccagagcctaggaagggtagtgagggggcacagggggtgtttgagtacaaaaaacaatagttagaaagaataaataagacctagtatttgataccacaactgggtgatagtagtcaataaaaattgtaaattttaaaataaataaaaaattgtaattggattatttataacacaaaggataaatgcttgaatggatgatacctcattttccatgaygtgattatcacgcattgcatgcttctatcaaaacatttcatgtactccataagtatatacacttacgatatatccataaaaattaaaaataaaacatttttttaaatgcactgaaatttcctccagatatctaatctccacctgccctaaacaaattattctctccatcagtaataccgtctctcttccctcttcctgacacagctgccaaaagtcttttctgctgttctcagctcctgtgctcaacttatatacctcatttggccaagtaaatgcattttattcaactctaagagcaaacttttatttttttccttaagtgtgcccttaaaagatctcactctccaccctatccaaacttaacaaaaacattcacccccaaaaaccacttccttggggatgactttgctgctaagaaaataaaattttctccatgttgttatgtttacgttgtctactatttaagtagaccaaacagaatgtgattaggttttttgagacatgggttggggtctttgtcgaagttagcaccttagctcatgggctataataataaggtgtgggtgctaatatatcacaaactataatatatttgcaactacatcttatttcagaaaaggatgttgttttgggaagcagtgagtcagcagaacattgaacacaaggcaaaagaaaggagatttcattcccactttcaaatggaagttcgtaacattcctgaattatccacaaacagggctgccaacctggaatcaattaagagtctcccactggggtgcaacgggagggagtaagatcttcaaaactgtattttcattagtaaagtagagaaactggcttcaagaaggtggctggcttggctagtaggccaggaggagaggagaagggcaaagtgtgggagaaggtataaaagtccagctttgccattttgccaagcaccgctttgaacagagccagagggtgtgaaatcagaaagcttagtagcaccccagttctccctttgcaccctttgcaaaggtagtaccatcaacaggaatagcaactctcaacaagtcttcattataatagaatgtcctctacagtttaagttcagtgaccacaaacctcttcatcacaagagatttccagtcttacgacaggcggtaggtggacactagaaaattctcctacaaccatttactccaaaaacacaagcaatgtcttagatccctgctactccaaatgtggtacccacaccagcaacagcagagttagaaatgcagaatcttggactgcattctaggcccactgaatcagaaactgattttaacaacacccccaggtaatttatatgaacattaaaatggtagaattgacttaaatcaattaggctcgaacgttgcatattagaatcacctggggaggtttttacacaccctccccagtrcaggcagtactctatatgatgtatctcaattatcagtatttttaaaacccaagtggttccaatatgcagccaattttgaggaaccatgacttaaagataacaataacaatatttgtattcaaatgaaaactttccccaaactttgcattactaattacctcttgggttttcctgataacttagatattaaacatttcaatgtatggttccgggcgggggtctggggagtgcggcagccatggcgagccaccttgtcctcaccgacagcaccaagatgcccatcctggggcttggcacctggaagtcccctcctggctaggtaaccaaggctgtgaaggtggcgatcgatgtcaggtactgccatattgactgtgcctacatgcaccagaataagaacgaggtaggggtggccattcagaagcagcttagggagcaggtggtgaagcatgaggctcatcagcaaggggtggtgcacataccataagaaggtcctggtgaaaggagcctgccagaagacgctcagcaacctgaagctggactacctggacctccaccttattcactggctgaccgactttaagcctggaaaggaatttttcccattggatgagtcagacaacgtggatcccagtgacaccaacattgtgaacacatgggcagccatggaagagctggtggatgaagggctggtgaaagctattggcatctccaactgtaatcatctccaggtggagaggatcttaaagaaacctggcttaaggtataagccggcagttaaccagattgagttccacctgtacctcactcagaagttaatccagtactgccagtccaaaggcatcttggtgaccacctatagcccccttggctctcctgwtaaaccctgggccaagcctgaggccccttctatcctggaggatcccaggatcaaggtgatcacagccaagcacaataaaaccacagcccagattctgatccacttcccccaggcagaggaacttggaggtgatccccaagtctgtgacaccagaatgcattgctgagaactttaaggtctttgactttgaactaagcagccaggatatgaccaccttactcagctacaacaggaactggagggtctgtgccttggtgagctgttcctcccacaaggactaccccttccatgaagttttgaagctgcgggtgcctgctcatccccaagtgacatatacctgtgtttccaatctcatttttttcttgcaaatgtagtatggcctggcctgtgtcactgagcagttggacagcaacctgtagagtggccagcaagggcttgtctaggttgatgttggatctgaagagcagtgtcagtagagtagaagtctcttctagtttgctttgttctttttgccccactggggaaagtataacctgaatacccttttctgaccaaagggaagaaaaatataccaggtcaaaatagtgccactaacagttaaggtttttttttttttttttttttttgagacggagtctcgttctgttgcccaggctggagggcagtggtgcaatcttggctcactgcaagctctgcctcccaggttcatgccattctcctgcctcagcctcctgagtagctaggactacaggcgcctgccaccatgccgagctaattttttgtagttttagtagagacggggtttcaccatgttagccaggatggtctccatctcctgacctcgtgatcctcctacctcagcctcccaaagtgctaggattacaggcgtgagccactgcaccttgccaatggttgagttttgactgcttggaactgtaatcccttcagcaagacttctctttgcctcaagtaaaaagtgctttggtgaaaaaaaaaaaatctcaatgtattctgccatataattaatgcttagatttcccaaattctgatgacgctaattttaatctgcaatagatccataactgacaaagggtcacttagtcaagagagtttgctgagtcttaccactcagagataaaacaattatttgtttttaaatagcgtttacagttcaagattgcttttctgattgaatacttcttctctcttatttctcaaattattactctattgagtaagaatcttaactatgttcaacattttcaggcatgattattataaatattttgcaagttagcttcaggagctgaaaagatttcttgatgtcaggtgatacttttgttgaatcaacaagattgactggtctcatggctggtgtttagcaagtcaatcattttcactacacaatagataacagtgaactaaaattttcttttattcattgggaggctattctgtgatactaagaacaaagaaaatcaagtctctgtggaaccagagtcaatcttccaaaatgtaacacatccattaggagaaaaaaagagtgtcagacaagaaacaaattggctaaattggttgaaatatctctttaaaattaagtttacatattaaaggaaagataaaaggaatatgcacatcatttgctaagacacaaatatcatctgattttcagctatttcacatttctattttttcccccttactacattttcagcacttttggttttgaaaagcagaaaatgaagtcaaactggcttaaacagaaaagaagatgaatttattggtgcatataactaaactatccatgggtatctgacttcaggtgctgctggatccagttgctccaataatgtcagagttagtctttctctttctccagactctgctttttcccccttacttccttaatttttagttgtttgtaccccacaattgtcaattatgtccaataaacttcaaatatatatctcattgcctgatcgtgttttcattgcctgtctctgaatcaggtttatagccaaggagatacttcttggcaagatcttgagtctgtgcttatcctgtggagttggagatagggccaacccagtttaaatcatataaactgagaagaggtgagggtaatgatgccccaaaggataatcaaaggaacgatgtcagaaaagggagaatggataccaaggagacaaaaatactactctagaagagatcctgcatcatttgcctttaagaccgatacataatataacagtttcctttgagaagtccaggagaaatgagcttagagaattatcttttcatctttgtttttacccggcagcagagacttccaacacatctatgttgtaccaactcaattttaagaaagaagaaatgtctgacattccctgtcataaattcttgaagtaccacagtccatgaaggggaaacctgagggctgagggaagtggtggaataagcacactgtggtcagccttgctaagtgtttcatttatcttgttgaatgtgaaattcatctcttttgagcatagcccggtgcccacttacttgtatgctctcccttattcatctactgttgatataaaattacttaaactcagggtttttaagtgacttgagcaaagaaaatcaactttctatggacctaaactctattttccaaaatgtaatacatccaggaaaatgtgcaccgaggcttcaaggtgggttcccaagactcaaccgataactgctctttatcatcataaatagcagctcccagaaacccagcacagaccccaagaaattgtcacatgactaagactgaactcttatctacttctcagtcttgtatttttttaagacaagtgaaaatgagaaaagttttgtacaattgcacaatagaaataggattcatcaaataaatggttgagaaacactcaaatattttctgtggaaattctttctttccatggcttatggatgtgaagagtaatgtactagacagatatctaaatatcttgtctttttctctgcccaccccattccaagaattagaatatcagcccttattcagaattgtcaacttgtcatcctaggagattcgcagtgtagtatcagtttttaaaatgtgccaccattgctttaaagtagggtttcacagtcgcagtactattaatattttgagtcagataatttcttattgcaggggactgtcttatgcattgtagcctgttcagcagcatccctagcttctacccactagatgtcagcagcagcaccccctctttgtaacgaccaaaatctcagacattgccaaaggtccccctgggtgcaaatgtgttcctggttgagaacttctgcttgaaaaactgaaatgaaaatagtgaaaaccatgaaatacttttctaagataatgggaccactgtactccagaataaaaaaaatatttccttttcttttaaattccggcattgttaccattattactttaatattaacccaaaacatactttttaaaagttctgagaataaaagctgaacctgcaaaataggataactccttttgctacattaaccttaaaaggtgcagaagtaaagagaactactgcttgcaggggtgtcagatggacatgcctgcttaaatgaagattcctcttttccactttcctcctgatatctgctggtcactatagccacaagaacaggagtgattcagaaccaggacacatgcactccagcatgacaagttcaatttaaacctagatcggcaacattaaaaaactacactaaatgtaatgaatgaatatacaccaacaggagatcaatgcactttgccacaccaattgcttgggattctttaagagtaggaaaaactcaaacattttcactaaggcttcactttgttaaatctctcctgagacttttggatccctgaattttaggcaggcttaaacacaaagtcctttcttagtacttggagatattttacccataaggtagagtaatgagggtcttcagtgataatgaaggagcagaattttgaatattttaatatattctggaacacttatatgtttcaagctaaggaaccagtataattccagtacagaaaaaatgtattatttaatgatattttttattttttaatttttgtcctaayaaagttctaaaaatatagttagaattatgttcagaaccagaaatatatttcaaaattgaaattgtgatgtttaaaacagaaacaatgagttgcttcctagagggattaaaagtcattatttgggacatattatgtcctgatttttatcactgcaccctattaaagaaaatgatatctagggttttctttttttagagtttgctgtagctatacatcaggttaaagagcttgggagatgaattttttactttcagaaactcaacgttctaaagatgacttcaatgtatctactgattggtctttgtatagaaccaaatttaagctattttaggcaagtgattctataactttaaaaattcttctagaaaaaaataagaaaatatataactcatctattcctttcaagaagaaagtttattgttttatccaatttagtccctcataatgcacctaagaattacttccatttgagtatttcccagtaaaggatgctgtttataaatgctcctgtccccctgtttgaagttagatttctgtttactcttctccaggttaattgttctgattctaagagcatttcttagaattgtttttaagttttcattctttatccaattttgagtctctcttttatttagacataactttgtaaataaagatattcaagaaatgaatatagagtttaataaaatgtgaagcaaatagaacctttcaaattcctcttgatgtcatcttggtattaagttatatatatatgttatatataaattatatataacatatatattttatatatatatttatatatttcatatatatttatatttcttatatatatatgtatatttatttctcagaccctggtcacttctttaatgagcttagattctttggaatactaacccatagttttcccttaaattattttcatctaagctcagaaaaatagcaagttaattaccctttatatgtgataaaatgaaaaatcactcaaaacccaagaccaacaatgatgtaagaaactggctggaattcacattcttaggtataagtgtgatgaagaataattacattaaacaatggaatatcaaaaatatgctctttcatccaagagtgacgtaagcacacggaatttatcacaggacaacaatctgatatggattttaagagttttgcccaagaactttccatgaggtctttgtaaaaataaattaataagattttcatattaatttctcccttcattttaaaaatgagaaaattgagaaaaatggaagagtacttgagtttgataatatctccctttttatacaaaattcggccatgtatacaataaaacttctgaacattaacttacaagaaaaatgataccttcttgtcaagggcatgatatgtatatgttgatgaatttttatttattaactcattaactttagcttgctgttggaaactgtgataaatctaaaagctaacaattggcttagatgcatatatcctcagatttggcgggtgttccacagcttaaaaagaaagaaaacaaataagtaaaccaaaacaaaatccatagtcctgcaaagtaaggccaaaaccagatgattttgaaaacaatgaaaatttgtgtttcagtgtttgcagacagaatatttcataaagaaagctgtatgtcatgtcaaataacctgcttataaagttcctgagggaaaatcattgcatcatttgtagagaagatctgtttttaaccacagattagctgatttattttctctgataacatggaaaaccattttgatattaagctatagagtcaggaatgatgcccagggtgaggctagcagcaaaatgatatttggtgcttatctgcaggtaaacaacttccctcactctcataaagagtcatctatttttctactcagagagagacagatgaggcatttgctttgggcagaaagcttaagggaagaaccaaattatcagcaatcaagataaataatgttttaatgtaatcttttttaaaaatatcaaaattaatacaaaaaaccccatggtggaccaaaacttaaatcttcacataaagaaagaatcaatatttctttgagatagggttttgttctgtggcacatgctggagtgcagtggcatgaccatagctcactgcaggtttgacttccagggttcaagccatcctcccacctcaatctccccagtagctggg

SEQ ID NO: 93455 - DNA, 12752 bp, Homo sapiens
ttaaacaacttacagagtatctagcagatagcatgctctcagtaagtactagacgatagtggtgatggtgctaaggaagaggagaaggtagaggaagtaaagatgattgtgactaggaaggacgatggaaaaataagtccagcagattaaattcccaaactccttcacttcagcccctctacttccctcccaatttccagctcatgaattcatacacgtacattccataaaatagcactctgacttcggatacttgcaagaaaggatgggtaatttttaaaaaatcgtttgctggccgggcacggtggctcatgcctgtaatcccagcacttcgggaggctgaggcaggcggatcacaaggtcaggagatccagaccatcctggctaacacgatgaaatcccatctctactaaaaatacaaaaaattagccgggcgtggtggcaggcgcctgtagtcccagcttctcaggaggctgaggcaggagaatggcatgaacccgggaggcagagcttgcagtgagccgagatcgcgccactgcacaccagcctgggtgacagagtgagattccgtctcagaaaaaaaaaaattgtttgcccatgtcaatcaaagaatgcaaagtgctgctacttttcctctttgtagttctaagcagtccaggttccagagacagagggatcacaaaaccttgataaaccagaacccttgggaaatgtgtcattttgcacacttcagttttccaagtagttgagcagcctgtcagatggtcatcataattttatgggctttgttttgtttttttaattttctatttttgatttaaaaaatctttccaaagtgcattacaattctctttccaggtccagtttgtgcaacaccgagatctgctcaggccaacctgtaccacagacacctaaacatcgactgttcaccctactccctgataagaactctctgttcctaccacagaataaggaagccccccaatccagtactcattgataaaagacagatagtaatgtgaacactgaccagatggtacccacagaagtactagcttcccactagtacttcccagaagttttgtgacttaatggtctatgtggcagatttgaccaataaaaggccagaaatgggcaggaggcagcagagaaactgcttacccttccttccaactccaggtaaatggtccaaaatagagtggttctcagtgccctctctggagacaggcagagcaactgaaaacaggctgagtattgttgtgaagctgtgaccaacttaaaaacacacgaatttatatgtggtctccatttcatcccatatgacttctttttcctcactcttgctcccctgtgattagtaaaacattagcatgtactgtaacttttcctttaggttctgttttctagggaacctgggccttgacaatgatcccaacttcattacaatcatcacctagctattatgctgcatgggaatgaatgaagtgatgagagctctttgggcttaaagcctccatttgcggggcagggaggggtgtacagagtcctgctctgttgtccaagctggagcacagtggcacgatctctgcttactgcaacctccacctccagggttcaagcaattttcctgcctcagtctcctgagtagttgggattacaggtgtgcgccaccacactcggctgatttttgtattttttagtagagatggtgtttcaccatgttggcaaggctggtctcaaactcctggactcaagtgatccacccgcctcgcttcccaaagtgctgggattataggcataagccactacctggcctgggcttacagcccctaaggaggtacttagggctgtttatcctgaaaatgtctgaagtcccaagattaagccttcagattctagttctgacctacctcattcaaatctcagctccaccacaagctgtgaaaccttggacaagaaatttaaaatcaagcttttgtttctcatccataatatgtggataatcagagtacataccccatagaatccttatgaaaagaaaatatgtcaatacttatttaacacctggcacagaaaaacacacaatgagagttagtgaactctttctcctgctgcctgatttacggggttatttcccactgctgtaagtatgaccatcttttgcaatatctccacttcgcaatttctaaaatgctataggattacatatcaggaaatccatcttattagaattgtgtgcaaagtgaaagtaagtagggactgaatgaaaaccacagagttaatgtatattagtgcaaactctgtagaaagctcccaatagccattattgcttacatcctggttcttgaacatattttaccaaattatgaagttctaaatgagctaaagtatcattatctatgtttgagtcatgctgtattcctacagaatacagaattttgagttagcataatcacccttgagcacctacagtatctcagttgtgaaacacaagaatttagtgaccataaaccaaactcaaactcactccatttctgatggtttaccttctaggataaatatcagtgtaggataaattagcagtcagatgaaagaaagagtacatgtgatattttagcatctaaagcagtattgtataaaatggttatccaatatttaataactgtttttatttcaaggctaattcagtttaatcattattcctttattaaccaaatattctattagaagtatcctcaaggtgtaagaaagaaatacctaactctacccagtatcggggagagatgtgtgatacgtatgaggacagaggaccaacacgcatgaaggagactaaccttactttccatcttcacagccccattcacaacctcggatctcatacttggatagaccgagtaaagaatttcctttcaaagccaacctcaaaataatgtttctttttaagaatcatggtgctttatctagggtttagtcaatgaaatcagaaacatcccaccaaaccaatggcccacagggatggaaattatggattctaagatacgctactaatatagagattataagttagattatttatagtaaattacaacaataatgtgcatattatgattaattgaaacttcttataatttagggaaatccctcaagttacacttttagaatatggagaatgagtctgagtgaaagaactctgggacagttattagcgcagctctcaaaagcccttttagtgtgcttcctggatactggtatattgttactcgtgatttcccaaagatattttatgagaaggagtaggcccaagaaaaaatgcaattctttcaacagccaactgctccgaaaaagcagtgagaccaaagctccatacttattgaacttgcagttttttttgtttgttttttgttttgagacagagttttgctctgtcaccaggctggagtgcagtggcgcaatctcggctcactgaaacctttgtctcccaggttcaagcgattctcctgcctcagcctcccgagtagctgggactacaggcgtgtgctaccatacctagctaatttttgtatttttagtacagatgggtttcaccatgttgaccaggatggtctcgatctcttgacctcatgatctgcctgccttgacctcatgatctgcccgccttgacctaccaagaccttgcagatttcttattcttcaaaggctgctttggctacagaatttccagggcacctcctccagcgatacagagacaccaaagagccagatccactcacatacaaacttggtctatgtcctttgcaacatttgtctgttggttcagtaacatacaagagaagtgacaacctaaaacctggtctaaccaggtttctttggcatcaaccttaaaatcaggactagactttgtggcctggcccagctcaaacacttcctgcaataacattaaagacttctttcagaaaaatgttcatttaccagtaatgctgggcagatgcagatttaacatgaagctattaaagccaacacttccaagccccagggaggatcctaacaatgattcacattgtcctacatttttataaattttgcaaaatatattttaaccgcatcagttcaaaatttctattctctttccccttgattacattttacatcacattaggtgaagtggttgcagccagtatagagatctgtctaaaagagaattaagttgaggatacatttagttttcatttagtgggattatttatatgactcatcttcaattccatacatatatatacacatacacacatactggaatggctaacaacagtatatatatatgtgtgtatatatatatgtgtatatatatatgtgtgtgtgtatatatatgtgtatatgtgtgtatatatatatgtgtatgtgtgtatatatatatatatgtatacacacaaacatactgttgttagccattccagtgtagaaatggcttccaaaaccactcccactatccattgcactgagacacccagcattttagcatggaattaagacaaaaactggtaccaccatatgaatataacctgaggtgggtggcactagaattacagcagttttggaggagaaattaggctaaaatgaacagagccagaagctactctgtggaaaactaccaaatgattagacatgtaaacttgtcactagaagatgtggttcttgcatacagagacaaaatgaaagttctctcctggatgatgcagcatacaagttaaaaatgcactgtaagttttttcttttgttgacaaaactcacagacacagaaattactagtttttttgttgttgttctttatggaacacagacttgcagcagtattattaatagcaagagtatctgtaaaagtttatatgaaaaagaaacttgatagaagtttttccaaattttacacaatgttaaaaattggcatgtcattaaaaataacaagttgtgactttggagaaatggttctaaactctcaataataaaaaacacaaatttcagtcaaccacactggagaaaaattaaataatctttcttattttctatggcaatgattacaaaattgttatcctagggaaaggcaatcaagcaaaatttcaacccaaaaatgtaagaaaaaaaacattagagaggtgtgtcagacatttaaaaaaatactatgttattcttctgagttttgtggtatctgtcatatttgttgactttcaaacttttaagttgctgtgattgttttccttgttctaaacaaacacaattttgttcttctaacttattctttttctcaaagcaggcattcgcaatagtatgaacttcaagccccacaaaactgggattcatttctgggattaggcattccttgacaattaacccttgcttagatagcattatcaactcacctcagtgctctagttatccttcatactgttatgtctccaattggaatttgtaaaactcatcccacaatgccgaaggatgggcctaaggccacagggaacatgatgaatgatcagtagaagacactcatttatgttgtaccacatggtgtacaattagattacatgcttttctgtctctactatcagtttttttttgttgttgtttttttggaggcaaggtctcactctgtcatccaagctggattgtagtggcatgatcatagctcactgctgcctcaatttcccaggcttaagtgaacttcccatgttagccctcccctgccccactagctgggactgcaggtgagtgtgccaccatgcccaccttatttatttattttatttattttttaattaatttatttatttttagacagagggtctcactatattgcccaggtcgatcttgaatgcctgggctcaagcagtcttcctgttttggcctcccaaagtgctgggattacaggtgtgcaccaccatgcccagcctctactaccagttcttcatttaatcatctgtaccagttggcaccacatgcccagacagccaccatggctgcctacaagctggtgctgatccaccacagagagagcatgtggaacctggagaacagcttcagtgggtggtacaatgccaacctgagcccagcaggccacgagaaggcaaagtgctacaggcaggcactgggagacgctggctctgaatttgacacctgcttcacctcagtgcagaagagagtgatctggaccgtccggacagtgctagatgttattgatcagatgtggctgccagtaatgaggacttgacacctcaataagggcactatgggtgtctgaccagagtcaataaagcagaaactgctgcaaagcatggcgaggcccaggtaaagatctggaggtgcacctgtgatgtcccaccacctctaatgaagcccaaccatcctttctacagcaacatcagtaaggatggcaggtatgcagacctcactgaagatcagctaccttcctgtgagcatmtgaaggacactaccaccagagctctactcttttggaatgaagaaatagctccccagatcaaggaggggaaatgagtactgattgcagcccatggaaacagccttccaaccattgtcaagcatgtggaaggtctctgaagaggctatcatggagctgaacctgtcaactggttattcccattgtctatgaattggacaaggacttgaagcccatcaggcgcatgcagttcttgggggatgatcggtaaagccatggaagctgcggctgccgagggtaaggccaagaagtgagggctggcgggcaagctactgtccccaggagcaccctccctgtctgtcacatccccctgtgcacctccctcctggacatgtcacactgaccacatctgtaagcatcttaagttgtaactgcagatggggatcagtggctcccattttcattttagccattttgtctcctgtagcctctctctttacaacctagtcagaataatgcttctagggcacaggttctcagtccaagctgagaaaaagctctccttgtccaagagagtcgaaaggtagtgacttgggtttttgccagtgctttgtttactaaggacttgtggggaggaaccatgctaagccatgaccaataaggagacgcaagagagccgatctgctcctagagccagtcctgtgcttttcagagtcaggccattgcctgggagctctagtcactccagtggaagatgaatgcaacctgcatggtgatgtgacaaacaactccttcctccctcaccccagagagctggctctagcaggttgagatcaatcctgactttagtgtatgtgttacatttacttttatagaagtatagtgtatataaataatccaaaacactaacctttctggggtttctcatggcagttgaaatagccccacatgtggtcatcagaaaataagccattcttcacaccaatatgggataagctccttgacctatgaggggtaggagtgcctcctgctgtgtattttagaatctctcccccaccttgtttcaaggcagtgaaatgcctcttggtcctgtccaagtgtgtctttcactgactgacttctgaatcatattctagttgcttggccctgccacacaggcccagtgttcatttgagcataactgtactaaatcctttttccagatcagtataataaaggaatgatatgcaattaaaaatcatctatacatcctcttcagtgcaaagctccataacaacagagaacaggtgcatgataaatgtggaaatgagagaaggaagaagtagaggtcaagaaaaaggaaaaaggaaggaggaaaggaagagaggcaggcttttaaggaagcaagtggaagaaaaaatcataaaaatgatttaaactctgttttacacatcttgaaggtaactacaaagtctgtttttttaccatttgccatatcttttagggtatgtgtgtgtacctcaaacttttatcttaattcattttttatttgtttgtttttcatacagggtctcactctgtcacccaagctggagtgcaatcatgcaaacatggctcactgcaccctcaacctcctaggcacaagtgatcctcccacctcagcctcccatgtagctgggaccacaggtgcatgccaccatgcccagctaaattttttatttttatattttgttggtagagatgggatcttactttgttgcccaggctagtcatgaactcctggaatcaagcaatcctcctgccttggcctcccaaagagctaggattataggcatgagctgctgtgcttggccttttattttaattctttcaacttttaatcactttcagttcaagacatttcatattcaatctgttatcttactcagtattattctcaccagtatactgctttttaaaaccaactagaatattaactatgttatgcaaatgaaaatctgtgaatttaatcacaaagagtggcccagaggagccactaagtcctacaacatccaatgggaaaattttgagagtcctattatattcaataacttgtataccaatgcccagaatttaatataaattgaactgaatcctacacacaactctttgtagattctgtctgtcgataagacatgctttcataaaaactggcaagtgaaaaatacagactacagcccattttaattttcatttcattttcttttcaacgaaacattgtgaatgtagtggcatcacataaatatttatcaaactctataattcttccaactgtaatgataaataaaagtatctttcaatgcgcgtacaaaacactagcagaaaactattcttagaagactgaaatgagatgcaagctatctgaagtcatgaagggcaataaatttatcccactgccttctggagagtcacaaatatatgaagcaatcatctcgtagttttggtaatctatgcttactaggcttctgaaatttcactgtttgataattgaagaaataaaaataacacagcatcacttggcactggagaaatgaggaccctgacctgatgggccggtaagccattgaaaatgtctattattaaatataaaaggaagattgcatacagagaaaagaccacacaagtttccaggttgtaggtttgccaacmtatttggattacctctttatgactgtcattatttttatcatttactagttatacagagacaatagcagctcaagcctgatacacaatgaagacataattacagatttgaaccaacagtcctctattaaaacctaaattgccctcagcccacagttaaaaaaaggtcaagaagaagacacctgctgaaaagagtaataaaaacatgctgtttattattttccagaagcttctaatcctttctcccacctggcttacatgacaactacaaagttcatcagaatgttgtggagtgttcaggactcctcagggaaacattattttttttctctcaaataattatggtcaaaaagtctagagccaagaaaagtttctgctgtcacttgatcataacttcatttctctcccttgcttgctcaggtctcatggggaaaatttaagggcaagcctgggccaaaatgcaacaagcctcttttgatttagatgggcgagagtaaaaatatcatctcaaaaaaagaatgaggacagggatgccatttagtctggatttgtcatgaattaaaccaaagccaccaaataacatctgtcttattcctcaacatgtcaaagagaagttgccaggcaagtttgggaaaaagaagttggaaagattaacaaccagctataagataaaatatgatttctggtgcttctgaatatgagacaaaggaagtttatattatattacattatgcaagagatatgctactataggaattaatcacccttttaaatatctgggctgaagctaatggtttcttcaatgacaaagagctcctcattttttcaaacaatacagctcttccatttcttggttttcactcacccactcttgactatgatgattagaggctttggacaaagaatattagactcagcactggcagctagtgaacagttcttcaattgaactaaataaataaaagctactcaattgtttgcctttattctttccttggccaccagctgaaataaatccttctccctctagaagatcaaagtacagcatcacaatgtttgagagcttgaaagatcctggtaccctaccatcggccaaacccctcttttttctgtctgaggacacaggttctttagcaaaacaaaagttgttcttttatggtagaaaagatgtggagagcataagttagatgggaagatacagtcctctggtttcactttcttaccttgttaaaaaagcattggataattattatctctctactgttggtactgaaatgtaccaacacatcaaagcagtattacagaaactgcagtagagattgctagaaaatatcagtattcaaaatattttaaaacttaaaatctgttttagaaatatttaaataagaaaaatattttatcagtcaaggtcctggcagaaaacagatggcacactcaaactgggtaatgaggaacatttaataaatagactatttacaaaggagtgggcagagtttaaagaagtaaaacaaaacaaaacaaaaatagtgtcgtaatctagggctagtaacagcaaggaactgttccacccatctgtggagggatgcatccagcccacagtaaccagtgtagaaagagtcaaagggatgaatatcctgacctggctctccttctttcttaggttcccattggtggaaccaagagatgtcagacagcaaaagagcccactggccaaaaagcctctgggcacagagcagaaagaagagtgagaatggatcagagaggcaaatgggagagagttagcccaactctgaacacgattataaagttatacttatttattattggaataatctgttcacaatatatagaaattagcttgacagtaattaatgtgtctcaaataccttttcggtttgtctatctgaattcaaagtgtacattaggtctcctaagtctctgctaggtctatcaaaacatttggaataaagagcattctgtgctcagatatgctggagaaatgtttcaagagcctcagtgcaaagaaaggtaaatgtaaatgcataggcacgggcctgtgagtctttcctcataacaccagatatagaaaaaaaagaaaataactgtccatacctcctgggatgactgaatgagaccatctgtttaaagcagtgtgcacagaacttggcacacaaacagatggtgctcagtagatgttaaccactgctgccactgttaccagcatcatctcttgcatctgcattctgacctgtcagatacccatttcttacacttctgcctgtttgtgtcactagtgcctggtgcagtgccttacacataggcagtgctcgattaatgtaagcttatgaagacaattgtgagagctgtcacgtgctatgtcatgctattctattgttcagtaattattcactcctctctccctttcccctgttggaggagtgtcatagtcagtttaagttgctataaaaaaaaaaaccttacaaccttacactgggtaatttgtaagcaacagaaatatattgctcacagttctagaagctgggaagtccaacatcaaggtgccagcagtgtttggagagggcttgctcctcacagatgctgcctgctaggtgtcctcatatggcagaagagcaggggagctagctggagcctgttttatcagggcattaatcccattcacgagggtggaatcttcgtgattcaatcccttcccaaaagccccacctcttaacactatacatttgttattaggttctaacatgagctatgaggggtgggggaggggtgcacaaacatttaggacataacaaggaatattcttttctgctccacagtgctgagtttggccccatgacctgctttggccaatggaaagtgagccagttttgaatagatactttaagaggcactgcaagtttgcaccagccctcttgagctcctgcctctcactttgagaacatcatatcccagatagtgagtactccttcagcctgggttctggaatgaaaagacatgtggatcagatcctaagtcaatccagtctgccacagtgctgtttcagctgttcccccagagtctggggcaagaaaaaaatatttccataagccagtgaagtttcacaattgtttgttatatagcaataacccagaaaaatctgacaaatacatatgtgtaacaaggttatgatggcatgctggactggaaaagaaggacaataacatgaaattttgagtccattacactagagttcaaatctcagctctgaacagctaccagatgtgtgaccctgtctgggcaagcctcagtgatccctaccttgttgcattactgtgacaattacaaatagtacctaaaatgtaccttgcacagtgcctggcacataataggtacttgataactggaagaaataatccaattagtaataaaggatggcaaaatatcttcccaattatccatgattaaagtgccaattggaaatttttcatctcaattaaatatttctttaattaaccagataaatagaaagggtgaaaccattgatcaagtttgtaccttccaaaatatttatagaaaattacattttgagatatatactgtgctctttctaaaatggtgtaaaacctctgagtagtcaaaaatatgaatc

SEQ ID NO: 93456 - DNA, 13589 bp, Homo sapiens
aacaaaggagaaaatatttgggacctacagttaagtaaaaagttcttagacaatacagcaaaagcatgatccataaaagaaaaaaaaggaataaattggactttatccaagtttatagcttttccttagtgaaaaatcctgctgaggataaaaatatgaatgacattctgagagaaaatatttacaaaccatgtatctgacaaaggacccatacctattaaaatatacaaagaattctcaaaactcaacagtaacaaaataatccaattagagaatgggaaagtaatgaagagatatttccttgaaaagaataatacagataatggcaaggaagcacatgaaacgatgttcatcactagctattaagaaaatgcaaattaacatcattagttattagacaaataaaataaaaccatggcatgttatcactatacacccatcaaaatggctaaaattaaaaatagtgacaataccaagtgctgaaaaggatgcagagaaacttgctctctcatatatgtgggaatataaaatggcacaaccactctggaaaatagtttggctgtttcttaaactaaacatacacttaatgtatgatctaccaattgcacttctgagcatttatctcagagaaataaaaccataagtgagtaaaaaaacctgtacccaattgctcacagcagctttatttgtaatagtcaaaagctggcaactaaaatatccctcaataaatgaatggttaaactgtggtatatctatataaaatgctactcgggaattaaaaaggaacaaagttgtgatacaagcaataactctgacagatctgaagggcattatgccaagtgaaaaaagctattccaaaaggtcacatattgtatgactccatttgtataacactgtagtttcaccatgttggccaggctggtcttgaactgtgatctgcctgcttcggcctcccaaagtgctaggattacaggcatgagccaccacacccggctggtttaacactcttaacatgataaaattatagagatgaaaacccgactggtattggctagaggttagggatggcatgagagacggggtgggtgtgagtgcaaatggtaggctatgaaggagagtttcagttgggtgattacacatgtgataaaaggacatagacagagagaaatgccaaattcctggctttcatattatactacaatcatgtgaaacgtaaccattggggggaaccattgggggaaaccattgaagtgaaaggtacatgaaacctccctgtattctttttgcaaatgcctgtgactctactaattattttgtaattaaaaggtaaattaaaaagttgttcagaaatgtaagaaattgtctcaactttcaatcattaatagaaatattataattttataaaaatgaaacaaatatttaaaacagaaatatacaattagaaaaacaatgtttgcaaataatagaaaaatgaaagaggaggtaaaatatagaaacaatgtatttagtttaaaattgagcactgaccttagatttatcatcacctgaagctcttgtggcttcattcagagggacagccccatgttcccttgcctctttgaaaagttcattcacaattttcccagttgaaggtcgaactatatttaatccactgtattcatgttcacttgagtaaaacctttaaacattttagttcatgaataaaaacttaggataacagacataaactgaagtaaaaagctacatagtcttatgaaaataaaagtattttatttaaaaagaggcattattttgacttctatgagaatatttaatttttaaaatgggattaaggaaaagtataataaataggaaatcatatactttctcactgagtttgcaaagattgattctaagggcaagttcagcctccagcacggcaactggcttgcttgctgatccctcagccttctgtaactgcttatcacatacatctcattcactaattcagcacttctgatgtagaaggaaaagcagtgtcaacagtcaaaagatagtcccttctccctaagaaggccacactcagtagagacctagttagtgacgagatctttagatttagacagtataaacagctaattctaaactaaagggttatctagagaggatttatctttcagagatttttggatttaagagacctactcccttaaaagcccctgcgtttgttaaaagtaaataatttagacagtaattttttggcgaccaatttctactttgactccaacttcataaatggtcctaggaaacataaaaattacctttacgtaagattaataacctacttttatctttcaagatttttttctatcaagaatatcagaaactataaacaatgaagtatcaacatggagacttccagggtaagatgacaatcaaacttcagttgttaaaatacttataactctccaatccaattccaaattcacactgaactgacacatagaacaaaacaatggggggaaatgatatctgccttggagactaggaatggaattcaccttcaaggctttctcctaaattagaatatgcaaaactgagtaagatagaggaaagaacagaccagctctcactttgcagtaaaggaaggaaaagatccatcaggatggagaacaaggagacaccaggagaaccctactaaaccccacaaactgcagaaggtggaggtggggcttcatcctgccagtgctctggagaagtacactgggcccaaatttatctagagcaggagcctatggaagcccttgtcccaagcttacactcaagggtccagagtagcaagcaaggttgaacactgccctagttggcttttaagacaagccttagtgttagaagcagattattttagggagcgacgacaaacacagaaaagcaaagcaacacttcctgctgcagctgtctgctgccgtaacactcctcccctctctggagtgccctggaaacgaggaatggaagtcaccttcaaggctttccacatctctaatctggcaaagtgaataatcattcctttttatctcagtcttagtgagaaagaccttaccgcaaaaatcggtcatagcaaatgatttcctatctcctttacggttaacggtttttattatttgaaatctttgcctactctaaggtcataaagatattctattttcttccagaaatttgttttaatttctatatttagatccacaacccatatggaactgacgtttataggtggtataaggtagaggacaagaactattttttctctacataaatgtccatttgtcccagtaccacctaatgaaattctgcccctcactgctctgcactgtcataaatcaagttgcctatgattcttgagttctcgtattttggtccatggtctactgtcagttcttactctcttaaccattgcagctttacaataagtctttgcatgcagcagtgtaagtcctcaactttaattcttcatgaatgtttggggcaaaaatatttattgattgctgaagtaattctctatactcattcaaactaacttattaaatataagtgaaaaggaataaaagataggcatctgtagtacagaattagtactcagctgggccttaaaaggatttaggacattaggacttagataagcacagaggacaagggacaaaattctaggaatgaagaggaacacaggaggaaaacatcaaaatgaccagaggaatcagaaaaagaatcagtcttttacagttttctttgtatgcaattatgtcattacacataatgagctttatttatttccaatttgtatacttttgtttttctaatctcattgtgctgactaaaacctccagtacaagttgaatgaaaattgtgataggggttacccactgataatgttcccaacttcagaagagttgagcggtttcaatctttttagatcctaatgatgattacccaaaccttaaacatattatctgcgactggtacccatctttcccgtgcatttactccctgtggtaagatttttgctcccattgtgctactgaatctcaaggtttgctactgaatactcaaaggttctgagttatcttctcattgccaaacacaaaagacttccctcagttattaaacactttctgaaacatttgatccttttgagcctatccttcttctccctttcgctgtttcatagttgaactctctcctggactttcataccaaaattgtttgtttctttgcccaatgggatccaacatctccttctctattttactgagttttcttcctcctcctcttacataaatatgcccatatccttgacttcaattcccctctatttaagctcatgtcatcatcaaaatatttatccactgccaaagataacctcttcctatacagatgactctgaaatatgtgcttttaccactcacttatggtccagtgttgaatttaaaagcacctgctagatagttctacttcactcaagttcatctccaaaactgaagctatttctacacataagccctcccattaacaatcacactttttcctgtatcccaaatttaaaacatttaagtcttccctctttcccactggcttactccctatatcccatgtcattacatttctacaatgaacaccttgaaaatatcctgcattaatttcacccttttctctccgttccattgacactacctcaatccaaaatttatttatatattttttgagacaacatatggctctactgcccaggctagagtgcagtggcgtgatcttggctcactacaacttccacctcttggactcaagctatcctgccacctcagcctcccgagcagttgggactacaggcgtgcaccaccacgcttggctatttttttgtagagatggggtttaagccctgttaaccaggctggtcttgaactcgtgagctcaagcgatctgcaatgcttcagcctcccaaagtgctaagatgacaggcgtgagccaccgtccttggccttgaatccaaaatcttattacctcattccttagtttacctcaattgttcctgtcttgatttctttctctctttatcctgttctctccatcctcattaattttatatagtattgccagtcctattttcctaaatgaatagtaatagctaacatttatcaagggatgactatgtgtttagttaatcctcctaacaatggtattactcctattttacaggtaagaaaactaagactgaaggagtttaaataacttgccaattggcaaaaccttattagaagacagagaaaaaaaaaattacagggaggaggagcaagccagcctagggggcggctgcacagtctccaggatccccaggcctggaggggggtctgtgcacagtcggctggctccgccccgcatctggtcccgagcgggcctccctcgggccagcccaacgtgaccgagcccagtggagcctgagcaaggaacgggtctgtcacggagccggaatgtgggaggaacatgacattgtagagatggtttcacccaaatatcactggggtggaggcagaaaacccactgttgataagaggagctgacagcagttttttggcaaggcctagtaaaagtaaccctggagacttcacactttttgttagaagaaatggagctgtcacccacatcaagattcagaacactgggccggtcacggtggttcacacctgtaatcccagcactttgggaggctgaggagggcggatcacaaagtcaggagattgagaccatcctggctaacatggtgaaaccccgtctctactaaaaaatacaaaaaaattagccgggcatggtggcaggcacctgtagtcccagctactcaggaggctgaggcaggagaatggcatgaacccaggaggcggagcttacagtgagccgagatcatgccactgcactccagcctgggtgacagagcgagactctgtctcaaaaaaaaaaaaaaaaaaaaaagattcagaacactggtgattactgtgatctgtgtggaggggagaaattttccactttggctgagttggtccggcattacacagaacatcacgggcaatkaaaagagaagaatggagatgttattgagcttaaatatcctctgaactgtgcagatcctgcctctgaaaggtggtttcagggacacctctctgggaaagaagcagagaaattattaactgaaaaaggaaaacatggtagttttcttgtatgagagagccagagccaccttggagattttgttctctctgtgcgcaccagtgatgacaaaggggagaacaataacggcaagtctaaagtggcccatgttatgatttgctgtcaggaactgaaatacgatgttggtggaggagaacggtatgattctttgacagatcttgtggaacattacaagaagaatcctatgatggaaacatggggtacagtactacaactcacgtagccccttaacacgactcgtataaatgttgctgaaatagcagaattcgagaactaagcaaattagctgagaccacaataaagtcaaacaaggcttttcggaagaatttgagacactacaacaacaggagtgcatacttctctacggccgaaaagagggtaaaaggcaagaaaacaaaaacaaaaatagatataaaaataacctgccctttgatcataccagggttgtcctacacgatggtgatcccaacgagcctgtttcagatgacatcaatgcaaatatcatcatgcccaaatttgaaaccaagtgtaacaattcaaagcccaagaagagttacattgccacacaaggctgcctgcaaaacatggtgaacgacttttggcggatggtattccaagaaaactcctgagtgattgtcatgacaacgaaagaagtggagagaggatagagtaaatgtgtcaaatactggcctgatgagtatgctctaaaagaatatggcatcatgcgtgttaggaatatcagagaaagcaccgctcacaactatatgctaagagaacttaaactttcaaaggttgggcaagggaatatggagagaatggtctggcaataccacttttggacctggccggaccacggagtgcccattgaccccaggggtgtgctggacttcctggaggaggtgcaccataagcaggaacgcatcatgcatgcaaggccagtcgtggtgcacggcagtgctggaattggccggacagggacatacgttgtgattgatattctgagaaaggtgttgactgcaacattgacgttctcaaaactatccagatggtgcagtctcagaggtcagggatggtccagacagaaacacagtaccgatttatctatatggcggtccagcattatactgaaacactacagcgcaggattgaagaagagcagaaaagcaagaggaaaggtcatgaatatacaaatattaagtattctctagcggaccagacgagtggagatcagagccccccsccccgccttgtactccaactccaygctgtgcagaaatgagagcagacagtgctagagtgtatgaaaacgtgggcctgatgcaacagcagaagagtttcagatgagaaaatctgccaaaacttcagcacaaaaatagatgtggacttcactctctccctaaaaagatcaaactttcgcaagaaagtttatgtgaagaccaaatttggatttggaaggcttgcattgtggttgactaccttttgataagcaaaatttgaaaccatttaaagatcactgtattttaactcaacaatacctgcttcccaattactcatttcctcagataagaagaaatcatctctactatgtagacattatattttatagaattttgttttaaattgaggaagcagttaaattgtgtgctatattttgcagattatggggattcaaattctagttacaggcttttttttttttttctttttataaccttaaccagttttaatttttttttcctcattgtcggggataagaagaaatgatttgggaagattaagtaacaacatcttagaaaagtgagaacaatctcatttaccatcatgtatccaatagtggataattcattttgatggcttctatttttggccaaatgagaattaagctagggcctgagactgtcagaagctgactggtctacctttgcattggcattaaagagtcatagaaaaggaatcatggatatttatgaattaagaggtgtagctttttttttttccagccgatgaccaattacagtttggcttttgactgagaaggttgtggtgggaaaacgtttgccatattttctttgcatttgagtaactgtcttctactcagaaaaaaggcatctatgaatgaccagtgtttttggttgtcaaatgttgctgacaaacttaccctaaaactttagtggcttaaaaaaaaaaacccatccccggctgggcgcggtggctcacgcctgtaatcccagcactttgggaggccgaggctggcggatcatgaggtcaggagatcgagaccatcctggttaacacggtgaaaccccatctctactaaaaatacaaaaaattagcagggcgtggtggcgggcgcctgtagtcccagctacttgggaggctgaggcaggagaacggtgtgaacccaggaggcggagcttgcagtgagctgagacctcgccactacactccagcctgggcgacagtgcaagactccgtgtcaaaaaaaaaaaacaacaacaaaaaaaaaacccacccccaactgttcttcaatttgagttgggctcagctgggctgttcttctgccagcctgcaggtggccactcatatggtcagcaggttggcggagagactgggatgtctgggcttctctttctgcctgcagtcctgagtctctccttcttcgtgtagtctctttcagtggcctggctggcaggtagctagacctctgacatgaagctcagagctcccaagagctcaaaagcagaagtggccaggccttctgaagacttaagtccagaattgtcgcagcttcccttctactgccctctattgatgatgatgatgatgatgatgatgatgatgatgatgatgatttcgtctcaccagaagagagctggagtatgccctctacttactaaacaagtcacatgcccagaccagattttaaaaaagggtgtgaagtagaggtgcagttaattgggaggccactagtctaacagacggtcacaaccactgccatggaaaaccaaggatattagcaaaagcagaagttgctagtgaccttgggaagccaaaactgcttacagtagctgagacaagctgaaagactgagaaataaagagagggtcttcaagaagcttcctgaatgatttttgccaatcctgagcctgtttttggaaccagcacttggggaaactgatcttgtgaggatggatgtgtttagggactcagggcttttgaaagcagcaccaccccactggggcacycccagacttgggaaatgtgactctttcttaatgccactggtttttagtcaggccacagtgagaaggaacagccctaacaggcctccagccaggttgaacgagatcatttttgttttagccaaatggtaagatttgctaatgttccaccttaagtgccttttccaaagacatccctcttcgccttatatgttgaatcatcgagtgtggatatttcaatgaaaatatcattaattgacttttgtgatggtaataaaatgctgtggcatctttgctgtgaagttattgtttcctcggattcttctgactttggctcctgaaaggaaggcctagatccagccctggtagtagttcctttctgaggtctctcagtctcttaagaccctgagttagtttggctgccattctcactaacaaaatgtgtatcagcccctatccctgccccccaatattcattgaactttgaattgcttcagaacacgggtgtggcctaaaggtattcccttattagggaaatgtcatgactgctgtcttctagtaaaacttgtaaagaaaaagattccagttcagtatttgcagcaagaagcttgaatcctgttctttttattgcattgttacattgactcattctccattttgctttggttttgttttgacttgactttgggggtaaagtctttcaccagcacacaagagtttgattgtacaaatatatctccggtattaacatctctgcccgttgcttaagatcagttgcttttatactcagaatggaaatacctgatcttggctagctttgtttgttatattgatttcatttagatttccctccacaaggtcagcaaactatcatgttcttatgtaaccttaggccaaggccagagttatcatagtccctaggttgctaaggcttatcatgtgtttggtaaaaggtgattgcaggttctcagatgaggttactttacatgggatggaatcaggcagagaggctgggatgatggagaaagcttgaggtgcaggttttaaaaaaaggtgtggaaattaaagttccaaagaggtggttgctgaggaagtgagagagcccagggccagtaatgagagagcccagtcagtaatgggtgagtcaggttatttggaaagttggtatgacaaatacatggtatttgtctacttctaggttgctggtaggtattaaatatgcacaatattccagagctcactgagggttttaaaattataagcataggattttatattttggggtgaaagagttatctggcacatggtattgggtttttttaaaaaagacaaatttcacagtcttaatagctttaaaaaaaaaaaaaactaaaaggtgcttcatgtctagtgtgtggccttcctgaaacttatggtcatctctcccactgaaatcaaggtcttttgaaatgtggctaaatggggatgagaaaacatgtgtaggactttcttggtgtgtgtgcattctttaaagagcccagttgcttcggggaaacagtcaagaaaatggtcaagattgtttttagaggtaattttattggggattttaaaactaataatatcttgagttatttttagttcagggggatgtggaaaggtttgcaattgtgaagtgttttattttagcttagtatccataagggaaacttagactgtagacataactacaaagccagtgcagtttttattttctgtatgttgttgggggaatcaagttttacatatagcaagcacatggcctccctgatgtcaggatgcctttgtcaggatctgtatttgcccttaattttattgaaatagcttttccttcttcctcttgaaaagttccaaaatatagtttattgtatctttcatcattaaaaatttgttcttttttcactacaggcagttcacacaaggcaaaaactattgaacagttggttttagtgggtcatataactttgctgtatatcaaactaattttgacaagttttcatcctaagcctcaaatcatgtaattaataatttgtctgtttatttgtgacctaattgtaattcttttattaataaaagctaatgggaaaaggatccctgattaagctgatgactagacctacaattaattttcctgcagtatatgaagtaccagagtattaaaagatatttaatattttattgataaatcttttaaagggaatatgttttaggatgtcatcattttgatgtgaatcatgtaaatgttgataatatgctgtttattatacatttagtgtttcaagagattcacttaattgcctttttgcccacttacattatgtagtctatttgcaactgttttttaaaaaaatgacattaaaagaatactttatgtagagaaacattagtggatgttaattgtctccccacctatatttatgggtgttagcgcaactgctttgctagttgcaaagctgtattatcagagtaaaagtgtatttgtaaactgtatgggaactaaaaattaggaataaaaccattttcttatatgaaaacaaaaaaattacaactgagatgtatctatcttgagtcaaagcttttaacattgtattatagttttgtcactaaatttttattaaaagacaaattgactttccactgccttctacacaggggcaacttatcttcttggtcttcaaggctgtatccgcaactggctacataatttgtgagacccagtgcaaagtgaaaatcgagtccccttgttcaaaaccaattaagaatttcaaaacagtaacagcaaagcattactccaagcacagggcccttctaagcatggggccttgtgcaatagcacaggtcacatgcctatgaaagccttcctggctgcacccccatctatccaaccttatttgctactaagctactaaagttctgctggttctttttctggttcctctggtcattttgattatgtgactctctgttcctggaattttgtcccttgtcttctgtgcttatctaactcctaatatcttaaatccttttaaggcccagctaagtaccaactctgtgctaggcatcttattcactttatctcatttaattctcaaagcaatactactatacaatgacttgtggaggacatatccaagttctgattgtgatatttaacttttcatggatgaatatgtcaaaacaggcatcagactatatcctgagggtctttctgtagattacgtaactcctcttgtaaattaaaaacacagaccatcttatgtccagagtttcagataatgaaactgtcttggcttaaaatgacaatgagacaataactgttttgatttcaaataccgcccaaggaggtggaccatgaaaataagcactgttttctgtaccaaacagacctgtagaaatacaacgaaactgggaaaatttcgatattgaatatgaaatcaaaggaagtatacacttagcattagaagatatcatacttagaaaaaaagattgcgaacaatctgctatacattgtattataaacagattaaacacagtttacgtctcaacctatatattttaaggaaactcagttcttttgatagataaattattctagaaatcaaatgtgaggcacaaaatccttacaaactggattactgaattatacctattaatcacagcattgtttcagacagcataaaagaaaacccttcactgaaatatcttaatgattatatttgaatagcaaggaaaatattaatacagtaatcttatgataagaactcaaatattaagtcattcaacttatgttcaaactggggaaacagtggccaaatagtgagtaaaatgcaagtacagagatacatattaagtactttcaagacttgggagaatatacaaattaaagaagcagctaaaaatacagtattttatatgtataaaggtaagaattaaatgaaagaataggatgttcaactagtgtcaagataccaaactgctgattacaaaggacacacagtatcttacaatggagtgctgtggtggtcagcaccttaaccaaatgaacatatcactaatggtggaaaatcctgaaattatgactcctgttgtcatgtaataaatagc

SEQ ID NO: 93457 - DNA, 83447 bp, Homo sapiens
  misc_feature (1)...(83447): n = A,T,C or G
ttgtgccagggagagctggagttagggcttagtgttggtgggaacagtatcagggactgttgggaaagatcagagtaacagcttagcagggagagtagaacttggggaggtgttggagggggatgaagacaggaaaagggctggggcctgtggggagactgggggctcagggaagccaggcccaaaaggtggactgagctttcagccttgcaaactgatagcaaacagtaggttagaggtcttcccaggaggccaggccacccttgtccccaccattggtggaaaagcaagaccacagtggttccctgttccagccgggaggccccagagctcactgcctttggccctgtgtgcattcctcactccagcactggagcccggttctggggccagatcctattcacagtgctcagagcacacaaagattcatgagctcgccttctgatggggcagagacaaaacacagcacagcaaacgattaggtcactgtaaggaagaggaagaaactaaaatcctgttatccgggttggaaagctgtttctaggggagggtgacatttggacagagctcaggatgagatgagctgagggaaggtgcttctgagcagagggaagagcaaatgtaaagatgctgaggaaggccgggcgcggtggctcacacctgtaatcccagtagtttggcaaggtcaggagttcgagaccagcctggccaacatggtgaaaccttgtctctactaagaatacgaaaaaaatagctgggggtggtggcaggcacctgtaatcccagctactcagggaggctgaggcaggagaattgcttgaacccccgaggcagaggttgcagtgagccgagattgtgccattgcactccagcctgggtgacaagggcaaaactttatctcaacaacaacaacaaaaaagatgctgaggaggatgcgggcttgagagaaggccaggccagtgaggctggacatatgaccaaggggaagaatagagggagagggaggcagccactcccaggtgggctctgaaaccgtctttgcaaaattgtaactgaggaaattatgacagtaaaagaaatcagacctaatcaactccatcttctttttttttttttgagatggagtctagctctgtcgcccaggctggagtacagtggcgtgatctcggctcactccaacctccgcctcccgggttcaagcgattctcctgcctcagcctcctgggtagctgggactacaggcatgtgccaccccgcctggctaatttttttgtatttttagtagagatggggtttcaccgtgttagccaggatggtctcgatctactgacctcatgatccaaccacctcggcctcccaaagtactgggattacaggtgtaagccactacacccagcccccatcttgcttctagcctttaagcagtccttgtggattcctgggtgtaggccgaactaactttgggaaggaattcagttcatggtttgactctgaaacaaaattgacaacagccctttcccgaaaagacccccttcttgcctggggtccagtcggcctttgcaggactaacaaattagctataagattagaaataaaagtttagggtcatgcagcctctggctccaagaatctgaacctccccaaattgctcctggggataacatcactattggaaaaccgcagatcagtgcgtgagatattttgcagactctgcattcatggatcagctgacaccacccagaccggttatctggctcaaccagttctgccatcccacccaggaatagaagatagcaagaaaaattcacttcaaccttctacgattccatctccaacctgaccaatcagcactccccacttcccaagctcctttactagccaaattctctttaaaaactctgatccccgaatgcttggggagactgatttgagtaataataaaactctggtctcccgcacagtgggctctgcgtgaatcactctttctccattgcaatgcctctgtcttgataaatcagttctgtctgggcagcaggcaaggtgaacccattgggcagttacagtttcatcccatctccagcaagcaggctgcattccttttaacaaagaacaggctcctcacaaacagctgaacagcccctcgggacagtttctcatctctggaggcagaaggtgggccggacagccacttcctccctttggaatttgctaacagccctgtgtttgggagagaccctctctaggcaagcaagctagaggaggaggggccttcctcttgtgttactgtgattttcggttgagggagtgaatcacaggcagtgaggcatgggctgttggctcaggatttcctggtgtttcctgcctgggagagctgccccactctcaggggcagcagcccaccactccttgacgtcaactctccctccaatgaatgggtttccttttccgtttgggaagacatgggatctgccgtcaatcccgtcgaccctgtctttctaaccctggcacctcctgtctgggaaggagcgagtgcgactaacgagaaggcagtgggtgagggcaggagggcgagggggactcagaggacagatgtcttctcgcccgcagtcattgagatgggcatccagaaaccccatccacagcagtagtgtctgacccagattgagagccggccacgcagctttgggacaccctgagtgctcccaggcaggctctctgggtcacctttgttgtctgggagggtcttatctcctctacttgttttcagtaactagcccagatgagacctcctgacacgaacaatgcatgtgctgtcatcctgtaaatggaatcatttaaaaattgcacaatctctgaaaaccattatttaacatttttgcaacctcaaaatgtatgtgtccccagcaaagtcgtggttgcctcactctggtgatagctctgtctgttttaaactagccatgaaggccagaggctctcgatgtgtggtttcagaagggactgggtcattccttgatgttatccttagggtaaatacttattagtgtgacttaccatgctatcaatattgctgtctgttgctagcatttctttaaggttgggaattcccagtgagcctgtaccatggctgtttgtctcagtacctcgcacagcaaagcacccatgcagaaaagctgccagctccttctaggatgataaccaggctcccatagcccatgtggcgctcaccgctgagcatgacggtgtagccatacagcaagtgtttactctgcaacaaccgtgggccaggaacagtgcaaaagtggaaccatgcaatggatggcctcattctagttactggaagttaggaaatttgatgattcaccatttctaacttggaagggttgaatcaaattccatgtagtattagtaaagctatctaaacgcaaaagaaaactttaagccaatctgaaatacttgttgattgtcaacaatttggaaactccttaatggcaccaaataaccaacattaacatttgggggtatttactttcagtctttctgtgtacatacacgcatttcctctttcttcctctcctttaatgaaatgagatggtctctacgctactccttggtaatttggcttttacacttaatgtcattaaatattcttccagaacatgttatttttatgattgtgtggtcttccaacataccgatgtatcattatttaaccaacccccctaccctgaagatttgcttccacacttccgatatcatgaacaaggctgagatgaacattcttgtgggaatgtgtagttgatttccctgcataatctgtggaagtggactttggagtgtttttttcagtgtgtccatatcttttttttttgagactgagtttcgctcttgttgcccaggctggagtgcaatggcgcgatctcgactcactgcaacctccgcctcccgggttcaagcgattctcctgcctcagccttcctgagtagctaggattacaggcatgtgccaccatgcccgtctaattttgtatttttagtagagacagggtttctccatgttggtgaggctggtctcgaactcccgacctcagatgatccgcccgcctcggcctcccaaagtgctgggattacaggtgtgagccactgcgcccggcccacgtgtccatatcattttaacctcacaacacggcagactatgattatgtcctacagcttttccagtttccaggtcccagcctatgtgggtcacccagggagctgcatattacagatcagagatcacctctcctgcctttcagaatgccacaaagttttccattttaaaattagctgcaaaaagtgttcttgggccgggcgcggtggctcacgcctgtaatcccagcactttggaaggccgagttgggtggatcacttgaggtcaggagtttgagaccagcctggccaacacggtgaaaccctgtctctactaaaaatacaaaaattagccaggcgtggtggcgcacgcctgtaatcccagctattccggaggctgagacaggaaaatctcttgatcccaggaggcagaggttgcagagagccaagattgcgccattgcaccccagcctggggtgacaagagtgaaaccctgcctcaaaaaaaaaaaaaaaaaaaagtgttcttggtgtatgaggatgtgctccgtcagctttttgggcatagaactgtgtgttgccaggggccagtgatatctgtgtacttgggcatatcaggagggtggaagactgttcatctcacacagatttgcttaggctgttctgtgccatggagctgcagcctctggggctaacagggtgaaaaatgattcctctctcagtctggtggggattttccgtggttctgtgcaccttagtgagtcagcgttaaccaggttacaagactttgtacaagaacagactttgttcaagtttaacaccttaggggtgttgtacaagtctaaagaacaccctatcaattagagcctcaaacagtaattccctcacttatcagtgagaagtcctttttttttttttttttttttttttttgacggagttttgctcttgttgcccaggctggagtacagtggttcgatcttggctcactgcaacctccacctcctgggttcaagcgattatcctgcctcagcctcctgagtagtttgggattacaggcatgggccactgcgcccagctaattttttgcatttttagtagagacggggtttcatcaggttggccaggctggtctcgaactcctgacttcaggtgatccacccgcctctgcctcccagagtgcagggattacaggcgtgagccactgcgccggccgaggagtcaatcttgacagccagtggtcaggctcggtggctcatgtctgtaatggcaacactttgggaggctgaggctggatgatctcttgagcccaggagctcgagaccggcctgggcaacgtagtgagacccccatctcgacaaaaaagtaaagaattagccgggcatggtggcacacgcactttggtggtcccagcactttgggagtggtcccagcactttgagaggatcccctgaggccgggaggtcgaggctgcaatgcgccaagatcgcgccactgcactccagcctgggacacagaccgagactctgtctcaaaacaaacaaacaaaagcttttttgacagctggtgagttggagccaagcgtgacggtgctagagcccctgcgccgcatcctttcctccgcgacctgtgacgagtgactgcaggaatgcaggccacctggcgcccttacggatttaacgggccggcttccgaccccctcctgcggcgcgaccactgttcctcgcctgtgtcccccagaggggaaactgaggcttgggggcggtgcagcgccgccctccccgagccaggggttccgcgcctgcgcgcctgagccgtgtccgcgctcgcctttgtcaataaagttcgcgcccgccgggagcggaagcggaagcggcgagtctccatggcggtggcggcggcagctgcggcgggacccgtgttctggaggcgactgctgggcctcctgcctggccgcccagggctggccgcgctcctgggacgcctgtccgaccgcctcggcaggaaccgggaccgccagcgcaggaggtgagaggggcggccgggatgagagtgcagccctcgcggctgcagcccggccccccggcgctcaaactcccggccccagcgtcctgggcatccgcagcgagtccctccccggtttccgggcccatttctgcctcccggggctcggcgcctgacctatgtgcttcttcactggccttcttgagggagggtgggcggctcgtgctccrttatcggccgggtccagccggcgggcctcctgcgcagcccggccagtccttgctccccgtctacaccgtgcttgttggcgagccccggccaccgtgcacttacacgttaaaagagggactgtgtgtgcgttcagggagcttcggtcaagctccagaggctgtttatatcatggtttcggccccaggatgtgagtgtcggagagttcagaggggtcttttccttaggtaagcctggctgtgagtgaatcaccgttgctgggattttgtgtatagagcgtttctcacatcctgccagaaaaagctgtgaagcaatccttagtaacactcaggcatgggaagaggagccactcgaaacactttttacacatttcaaagggcctgtgttctggaaaagtactgaagttatgtaaatgatgaagtaggctttggagcaatttgttcaggcagtggtcttttaaaataaacatttgccaagaacatgctgacctgaggcttgctaatattaaaaaaaaggggataaataattcttggccgggtgtggtggctcacgcctgtaattccagcactttgggaggccgaggcaggtggatcacctgaggtcaggagtttaagaccagcctgaccaacatggtgaaaccgtctctactaaaaatacaaaattagctgggcatggtggtgcatggctgtaatcccagctacttgggaggctgaccctgaggcaggatannnnnnnnnnnnnnnnnnnngggggggggggggcgtcgggtgggggcacggcgagtcgggggggaataaggcgagcgcgggaccctttcccttttaactcccaaccaataaaaaacaccgggggtctaaaatttaaatcctctcccccccttaacccaccccctagttgacaacataagagtaactgagtccccgcacatatttctacagaggccacatggaaaccgctaatacgggcacacccgaaaaacgggaaaaacggataggggaaaaacacaacatccctaaccccaaacacaaatacgtgcaactccctactcaaaaacacaaaattccactcgtgccccacactgaacgccaaaaacccaatctgggctcacctcaatctccaccttccaggttcaagcgattctcctgcctcagcctcccgagtagctgggattacagacataagccaccacacccggctaattttgtatttttagtagagacagggtttttccatgttggtcaggctggtctctaactcccagcctcagttgatccacctgcctcggcctcccaaagtgctgggattacaggcgtgagccaccgtgcccggctgcaaataggtttcttaattgagtcttacacttgatctttaaaaaaaaaaatcttagaactgcttcctttagttgaggttgcattgtgttagattttctatctgtacgtgtactcctcgggtgagatttgacctcctggggtcagacatctagtacagagatctggggtccagtcatgtgtactgattctaggtacagaaaagagcttgcttcatggtgatctatggtggaagattttcatcgaaaactcaagtttgatttaggggaatttttaggtgatagaatcagggcaggatggcgctcttggaaacctgctaggtttcacgttggtgaacccagcaggactggggctgtaaaagaaatggcctctgcattttttgcattttcattttttcagtgtttaacaaaagacctgctcatctctgggtgacgaagtcagatgacttctacgtcctggcatcaaaccactgagatttggtttacagtttcaaaaaaatgttctacccttgaagacaagatttaggtgactttgtcatttccctctatatgtttaaactatatgaaaaacacttcattataaatcattgttcaacattggaattgattactaaaggatgttggggcagttgacacaaatattttaaaaaagaaatctctcatgagtgtgctttttttctttttctttttctttttttttttgagacagagtcttgttctgtcactcaggctggagtgcagtggtctgatctcggctcagtgcaacctctacctcgtgggttcaagtgattctcctgcctcagcctccagagtagctgggtctacagacacatgccaccacgtccggctaatttttgtatctttagtagagacagggtttcaccatgttggccaggctggcctcgatctcctgaccttgtwacctgcccacctcggcctcccacagtgctgggattacaggtgtgagccactgcgcccagccacttttttgttttttggtggtgggaggggcagtgtggcagtggagatagtctaaattgactttctaatctcttttttttgtaaattgtgtgagtggatgcagtttgtgtgccttcatccttcattaagctgagagagatgattgtttctctgggacaacagttcaaccagcaactcagtttcttgggcattaagacagaagtttttgctttgtaatcctcggaaataatgcctrtggtaggactgaggataaatgctktgaccggtattgagtggtagtgtaggtttctgagcctttctttgccttattcggtttgcagttcttttctgattcgttgtggccttggtgttcgagttattcatgtttgttgtggctgcttaccctttattagctgctgactttgctttcttctccattattcagttgcacctcccaatttctcattccccgaatgatgtggtttcttgtaactcgctgatcattgattcattgataatagttctgtgcagtcatgagcttgaattattttaggttttagcttgtcgatctgagtcagctgttggagggccagtgaaccctcgtgaggggacgttccttttactgccgcggtttcctttcaggcatagagacagccagagagacagagaactctacttaaaattacttctgttaatgatttagaagcactgtcatttcctcttaagctagcatctgactcattatcattaggaactgctggatccgttaatttattcatcatgtgtgtattgagcactgctgtgctgtgctaggtactcaggaagcaaagataaagacacagccccacctccaagacgctcagacccataaacaattacaagaagtaggtagaaggtcatggcagtaccttggagaggtcatggaaggcttcctggtgcagtggctcakagctgttttgaaggaggggtcggagtagttaggctcggtgaagaagagggggagtggatgttcaagaagtgatagtgacatggactgcagcgaaaggcaattctgaggtcccaccaatactgaaaccatttccaggagctgactaggggtaccgagtaggggatggagggagggaagaagaggagctaggagcaagccagtctgggccagagacccaggaagacaagttctgagattccatgtatgatttcttttgattctggttcagcctgagatggtgggggcttttatatgaagtcggggcagtgggagcagaaaagagggctgagtgagaatcagtcttgatggggcacatggatgttggtacatttcacgaaaacggagtaaagargaggctcaggttttggggatgatggtaaagtgcatttgggttatgttaatcagtatccaggttcctctaggtgatgtgttcagtgtccagttgactgtggcagaactggagctcaggagagggagacagatgcttcagatagggtttttttgagtcatccggctacacagaatggttttttttttttttttttttttttgagatggagtcccactctgtcgcccaggctggagtgcaatggcacgatctcggctcactgcaagctccgcctcccgggttcaagcgattctcctgcctcagcctccggagtagctgggaatacaggtrcccgccaccacccccggctaatttttttttgtaattttagtagagacggggtttcaccatgttagctaggatggtctcgatctcctgacctcgtgatccccccgcctcggcctcccaaagtgctgggattataggcgtgagccacygtgcccggcccacagaatggccttgttacttggagtagatgagaccaagtgggaaatgtatcatgaaggcattagttcctaatcttgaacttgcctactatacaaggaaatatttatctgtggcttactttttttcctttttaaactatttttaagttttagctatacatgcagaatcatctttatgtttgaaactttttcacaatttgaggagcttgtgagtgtgtgtgttggatgggttaggggttcttaacttctctgagttataagagggaaacaggtgtccagcagattgttttcaattagattttctttcctttttttttttttgagacggagtttcactcttgatgcccaggctgaggtgccgcaacctctgcctcctggcttcaagcgattctcctgcctcagcctctcgagtagctgggattacaggcatgtgccaccacgcccatctaattttgtatttttagtagagacgcggtttctccatgttggtcaggctggttttgaactcctgacctcaggtggtccrcccacctcagcctcccaaagtgctgggattacaggggtgagccaccgtgcccggcctagactttcttacattgtagtggcaggtcacttgttcaacgtgtaagtagtttttactctgagggaccaccagatttccagaagttacttttctttgaactttgtgatgggattcggtcttccttactcttcagagtttagtataaccatctcttcgtttgtttatagcagtataatggctgggaaggggatatttagaatcaaagcatagttttgccaaataattcagatttgattttgcagtgaattaaaagatttacaacggactgactttctcaattgtagctttaagtgaatattaatgtgagtatccctgagcacgttatagttggtgatgaattagactcaatcagttgtctgctggtaggcaaatagaacccagcctgggattaaaatggtctgaatgataatccctttgtaatagcgtgatctgatttatgtaaacgggtcgattttgagggtgctgggagtcaggctgactgaagccctttggagtcatagaacatgcgattggttctcrtcaggcactttgatgtgcctggtgcatttggccacccaggctgtattgtgggttataaatatattttggatttctggcccccaatgtaatcgacttccttttggctaagccaaggggagagtcatctagtcagcatgtagctgcatgctggcagcctgggcctctcgtgccggacttgttatgggagttcagcaggccgttggtcttttgtaacctacgggaatccacactcatttcccttactcggggttaggtcttgcattagtcaggaagggccgcctgctgccagggttgcaggaagtacggtaccttcttgtagtttctggagcctttctcaggaagtgttatgactgttgctttttctcatcagttcacttttttacatttaaatatctgtgactgagagggtagggtgagttgttctcaaaaagtagtttctgaaaatattgcaatccagagagctcagtttcttttaaaaacttcttttttcatggttttgtacagatttggatgggctccaggccacagagtctgtaccgtgaatgtaccttacggttaaagaagggcccctggaccttcagaccacgcctctgagggacactgaattaccgacctgtgtttggtatggagagcgcaacttctgycctgttcagtgaggacagccctccagctttaccgtactctttcatcaaagtcctacataccctgttttgaaaaaaccccaagaagttggcctgttacatgtgtcccattggtagtgggtgacagtcagtactgcagctctagggggaaacacgtgttctctgacaccgggagaagatgtggaagggacgtctaaaggtgcagtgtagaccgcggtgtaattccctggtgtttgcttgtcttcagtggcatyccttctctgagaagcgggygcccggtagggcctccaggcgctgttgacacgcgctgaggagaaaggcgaggggtgccagtgttttccatgaagcagagcacgcgcagctgcagaacggtgaagtggaaaaccgtctcctccaaaagggagaaatgccttctgttttccccaggtttctttctttctttctttttctgagatggagtcttgctctgtcgcccaggctggagtgcagtggcgcaatctcggctcactgcaacctctgcctcctgggttcaagccattttcgtgcctcaacctcccaagtagctgggattgcaggtgcctgctaccatgcccggctaatttttgtatttttttttttttgagatggagtctcgtactttcgcccaggtcagagtgcagtggcatgatcttgcctcactacaagctctgcctgccgagttcatgccattctcctgcctcagcctcccgagtagctgggactgcaggtgcctgccaccaggcccggctaattttttgtaatttttagtagagatggggtttcaccatgttagccaggatggtctcgatctcctgacgtcgtgatccgcctgcttcggcctcccaaagtgttgggattacaggcgtgagccgctgtgcctggcctaatttttgtatttttagtagagatggggtttcactgtgttggccaggctggtcttgaactcctgacctcatcatctgcctgctcggcctctgaaagtgctgggattacagccgtgagccactgtgcccggcccccgggtttcttttgtaaacaggtgtgttccatagcttctcagctgcttcctgctctcactgtttcagtttggctgattattgtgagctcagttcccactgaggcctctcatgggggcaagtgtgtgcagggcgcgttgtcctgcctggggctgcctgggtggctaagcaggcttccctctccttgcttggtggcggcctcagtcctggctcgccgcttggtcagagcggttcagatgtgggtcttcctcaagatgatgggaagaaactttcctccyctccccaaggcaccctgctgaggacctctctcagtcaggggtcctcagcacttaggcccagcccattcctcagttcagggaatttgcctgcagattccacgggaagccttaaatcaggtgactgaacctttctcctgagtcaggcttcctggggtggtggctggagccgggccacgggctggtcctctgagaagatgctggtctcatttcacctttagagtggcaggctgaggattgttttgcattgtctgtcatttgttttggttgttgctgaggttggtgtggtgatgtagtacggctggtttgattttgaatgctggagcactggtgctaggggatatcactggctcttgccctggtcctgctctctaaacttctccaatattccagggtaaaggagtggccttcagagaggcaagggtggcagaaggttattatctgactccccagcccccaccacttcctccttcccataactagaactgggcgctagatggtgtctagaaagagatgattcaggggagcccaggtcttgatgtggaaattgtgtgtgtactggtttagttctctaaatggtgaatgtgacatgtaactagacttttttggtaaaataaccacagcctctgcctcctcacgtctcttggggctttgggactgggccatgtgctttcttggtaagtaagcctccctgggatgggggaattgagcttgygcaggtggtcagcccctggaggctgggattattatgcagtgggggctgctttagcatggggataaaccttttctgagcaaattcccaggagttacattgtggaaagccgggaactgacccccatggggttctgtctgatgtgaaagaaaaaaataggtmcctgagcagcgagcagtatagtttcagagcaagaactggctccttctgtcctggctgatgtgttgcagttagatggtgatgatggtgatgatgatgatgatgatgatgatggtgatgatggtgatgatgatgatgatggtgatgatgattagcatttttgagacacagtctctctccatcacgcagcctggagtgcagtggtgtgacctctgcaacctccatcttccaggttcaaccaattctcctgactcagcctcccgagtagctgggactataggcgtgcgccaccatgcccagctaatttttgtatttttagtagagatggggttttgccatgttggctaggctggtctcgatctcctggcctcaggtgatctgactgtgcaggcctaccaaaatgttgggattacaggtgagagccactgcgcccagccttttttttttttgagacggagtttttcctcttgttgcccaggctggtgcacagtggcgcgatctgggctcactgcaacctccgcctcccgggttcaagtgagtctccttcctcagcctcccgagtagctgggattacaggcatgtgccaccaggcccggctaattttgtatttttagtagagatggggtttctccatgttggtcaggctggtcttgaactcctgacctcaggtgatatgcccgccttggcctcccaaagtgttgggattacaggtgtgagccatcgcgcccagcctttttttttttttttttttgaggtggagtttcgctctgtcgcccaggctggagtgcagtggcacaatcttggctcactgcagcttcaaacacctgggtttaagcagtcttcctgcctcagcctccctggtagctgggactacaggtgcacgccaccatgcctggctaacttttaatttttctagagagggggtttctctatgttgcccaagttggtctcgatctcctggcctcaagtgatcctcctgcctcagcctcctaaagcactgggattataggcacatgctaccgtgcctggccatttagtttttttgagtgacactagtccagatgtggtctccttggcatatgttgtcattgtggcgacctgtgtaaaacactcagctccttttttatgcaccttccttttttgggtatttaaaattgccacttgaaggttgagtctcctccataatgtatccatgaaacgtagttggctttcagctccttttcctctctaacaaaaataaacctgtcagtacacagattaaacaggaagccagcataaaaaagccttcaagaactcttggcctgaggccctcgtggaacattcccagtgagagctgcctggtaaggaggagacctgcctaggataactccaggggctctgggctcatcagccctgtacctgccaaagtgggtctccgcaggtaggacggaggtgataggtgaaccctgacacctgtgtaggctctgtgtatgtgtgttttctctggactactgaggccctcttgggtttttctgctgaaagtggtcttgttcctgtttctttctttctgcacttgacctctagggtcacgcgatcgtccccctcaatctcccgagtagctgggactacaggcacatgcctccacgcctggctaattttttttttttattttttattttttgtagagacagggtcttgctatgttgcctaggctggtctggagctcctggtgtcaagtgattctcctgccttagactccagagtgctgggattacaagtgtgagccactgcacccagcccagtttcttctgcttacgtcccttcacacttcctgcctgaaacaccctcccctctgagttccttgtttgaatcctaccagctttttgaggccactggaggagaatgctgcagaaccttcccagtagcccaggcatcaccagttcccctttttgatgccttgaagcacatgcactatttggacattgatttaattttagcatcttttcttgtgttcttagatgatgtcaggtgtgtaagtctgtgaggctaccaaggttgtgggaggcagagactgcctggttcttcatttgtaccctccatggtatgtcatatgtgcttacatgatggctttgttgagggttaagttgaacaagttgaacttgccctctcctgggttgctatgtgccaaggagtgtttcctcttcttccytttttttttttttttttttttgcggggggacagagtcttcctctctcacccaggttggagtgcaatggtgtgatctcggctcactgcaacctctggcgcccaggttcaagcagttctgcctcagccacgggcggctaattttttttttttgagacggagtgtcgctctgttgcctaggctggagtgcagcggcagcatctcagctcactgcaacctccgcctcccagttcgagtgattcttctgcctcagcctcctgagtagctgggactacaggtgtgtgcgccaccatgcccggctaatttttgtatttttagagagacagggtttcaccatattggccaggctgttctcgaactgctaacctcatgatctgcccgccttggcctcccaaagtgctgagattacaagcatgagccaccatgcccggcccaatttttgtatttttagtagaggcggggtttcatcgtgttggccaggctggtcttggactcctgacctcaggtgatccacctgcctcggcctcccaaagtactggaattataggcgtgagccaccgtgctcggcccctttttttttgagacgaagtctcactctgtcactcaggctggcatgcagtggtgcaatcttggctcactgcaacctccgcctcctgggttcaagcgattctcctgcttcagccttccaagtagctgggattacaggcatgtaccaccacacccaactaatttttttgtgtttttagtagagacggggtttcaccatattggccaggctggttttgaactcctgacctcaagttttcttcccgccttggcctcccaaagtgctaagattataggcatgagccactgtgctgggctgcggctctcagcttctttgaaggccgcgtgtggactgaccmcatgacctggagcagtacagcggcacctgatttttggatggtctgagagatggcagaaatgctgtgaggcaggggagacattgattttatgctgctgttgcctgttcccccgcccccgaccatgtttcattagtgaatatgagactctaggccccttggggcctcgggttgatgggttgctgtgcacctttcccattgtccggtggtttctgctgcactgaagggtccttcgctctmctctcttgagctttgcaggagggtggcccaggatttgggaaacccaggcagcgagccctgygttacacatctaggcccttcatctgcaagctgatgcctgtgagtgtcatcaccccctctagagacgggggyggggggggaacagctgtttcccacctctgcactgggtggccacggccagtcgcagacttccaggatccacagaggcagcaccttctgctgttgactaaggttttcttggcagtgaatcggcagtgacagaccggtgggctttctgggaagtgcagctgtgggccatctgttgtctgtgcagggacatttacgaagcctgggaagattgagggctttatcatgaagcaagtgagtgaaatcatcttcctggaatttgtggccattcaggccttgggatgtttgagcatcctctcccccacgtccctcttgaggtcacacactgaagaggattttcctgctgctgtttgcaggactaggattcatagtaggtcaggtctgtgtggggctctgggtgtgcggtccctccacccccatctcccgcaggtttttagtcattgagcagcagaaatgaagttctgtgggcagaaattcatctccttcagccttggcctcagtggagtgtggagtccgcyggggtgcagctttatgtggtcgagctaacactggccagaaatggtgtgtgaccccaccaaacaggatgtgtctgatggtgaatgagtatggctcatcatcactcttttttttttcttctttgagatggagtcttgctctgttgcccaggctggagtgcagtggcaccatctcagctcactgcaayctccgcctcccaggtttaagcgattctcctgcctcaggctcctgagtagttgggataacaggcatctgcatcatgcccggctaatttttttgtatttttatttttagtagagatggggtttcaccatgttggctaggcttrtcttgaactactgacctcaggtaatctgcmcgcctcggcctcccaaagtggtgggattacaggcgtgagccaccgtgcgcggccacggctcatcatcactcttgagaggagctcatttkctcccgtctctccctgctccagcttttctttccgagtctgattttgattgattgagacagggtctcgctgtgccacccaggctggaatgcaatggcatgatcatagctgggagaacagccttgaactcttgggctcaggagatcctcctgcctcagcctcttgagtagctgggactacaggtttgtgctaccatgcccaggtaacttttttttgagacagagtctcgttctgtcacccaggctggggtgcagtggtgcgatctcgcctcactgcaacctccacctccctggttcaagcaattctcctgccttagcctcccaagtagctgggactacagtcacataccaccacgcccggctaatttttgtatttttagtagagagggggtttcaccatattggtcaggctagtctcaaacacctgaccttaggttgtctacctgcctcggcctcccaaagtgctgggattacaggtgtgagccactgcacccagcctgcccagctaattttaaacaattttttgtagacactgggtcctgctatattgctcaggctggtcctgagctccttgactcaagcattcgtcctgccttggcctcccaaagtgctaggattataggcctgagccaccatgctcggcataaattggatttttaaagagaaaagtttctttttctgggtgcttccttgaatagaaatcttgtttatctcatgagtcataaagcggggcatctgggctgtaatcatcagacttctgccagacttacccttctgctaggtgtcttttagtggtggctgcaggcaaatatttttgaggtagattcattagaacgttgccrtgtggtagctaaccatgtggtagcttttatgagtttacttgtggatgctctaaatttggttcctgagttgtttggaattaaagtttgggatttatctataggtattgacacttctcaagttgctcagttagtaggctctttaaggaataagaggaaagggggctgaaggaaaaatcctttagcagagcttgagttgggctcactttttaaaatgttctagaaaatctgacattcataacacaagcaacgcacccatctcccagcccctcttcactccccagtaactgaggggggcttctgcagaagtatttgaggtatttgaggtgtgacccagttgcatatttctttaaccaggtcaccatggctgttattggctcccttgctgtccccagctgttccccaggtcacctccccaccttgctgcctgtgtccagaaggcgtgcaccggttccagtggatcagaaacctggttccagaatttggagtctccagttctcacgttagggtgctttcttccccggcagagtttttcgagctcatgaaggtaagtggtatctaaaggaaagaagtttgagttagagcttttgggggatcaggttggtgagtcctgagtgctttctagtctagaaactttggatagctgctcaagcttattccttctgggttttacctgtcaggtttcagcttcatagatggttgagctgagccacagtcagaaacttgcctgtggggccagcgtctcaggtggagaagctctgagaaggcaacagtgagaacaaggacctagaccttatttttatttactaattttgttatttttgagaagggggtctcactatgttacccagatgggtcttgaaccactgggctcaagtgatccccctgcctcggcctcccaaagtactggccactgtgtgcggccacgggcctagacttcgattctttttttttttttttgagacggagtctcgctstgtcacccaggctagagtgcagtggctcaatcttggctcactgcaagctccgcctctcgggttcacgccattctcctgcctcagcctcccgcatagctgggactacaggcgcccgccaccacgcccagctaattttttgtatttttagtagagatggggtttcactgtgttagccaggatggtctcgatctcctgacctcgtgatccacccgcctcggcctcccaaagtgctgggattacaggcatgagccaccgcgcccggcctagactttgattcttatgggcgcactgattccttttcctccatggtgaagttgtggaccacgggaagggaggttggtgaggactgaggacccgtgggtcacatgggtatgtccttgctaaaggtgacaggggaggagggcatctttatctagtctgtgtatgatggacccctaacccgggaatcatctccaaacacagtagtgtcatcttggtagatgtagtaggaagtaaaaactcgtgggtgcgatttgatatgcatgaagaggcctttcaaagtaactgggaatctagacatcctgggtctaaggcttgtagtcttggttctttagggactctgtcttaagtgtgtgcctttcctctcctggtagtgatgtaagttttgcatttggggggttcagctttcaacatgttactcaggtttacatgccacatctggttattctggttaaactgctcattggaatgaacactaatcaacactgatttttaacagcatgaactctgagtttgtattagcagtgatattagaatgaaggtctagcccacgcgtgggggggcctaatgcctgaaatcccagcacttcgcgaggctgaggccggtggatcacctgaggccaggacgtcaagaacaccctcgacaacctggcgaaaccctgtctctaccaaaaatacggaagggtggcacacacctgtggtcctagctagtcaggaggctgaggcaggagaatcgcttgaacccgggaggtggaggttgcagtaagccaagatcgcgccattgcactccagcctgggcaacagagcgagactttatttcccaaaaaaaaaaaaaaaaaaaaaaaaagaatgaaggtctgatggggccaggcaagcaggtagaatgctgagagacaataggaaatctgggtagagactcccctttcacctttgtgcagaaaatgaactcactcatttgagtgcctgcccattttctctccttttgcgcttttgttctgtttgttgatccacgcttagcttgactggctcattcagagtgcattctttgtgtgcacacaggcgtgtccttttgttctcccctctcacctgcctccctgctctgctcacctgtccttgtttgtaccgaatgatgctgcaactgttggctctttgctcctaattgattttctccttggcttgaagaaacaggtttttcttttcttttcttttcttttttttttaagacggagtttcgctctcgttgcccaggctggagtgcaatggcacgatctcggctcatcacaacctctgcctcctgggttcaagtgattctcctgcctcagcctccttagtagctgggattacaggcatgcaccaccatgcctggctaattttatatttttagtagagacagggtttctccatgttggccaggctggtctcgaactcccgacttcaggtgatccgcctacctcggcctcccaaagtgctgggattacaggcattagccaccgtgcccagcctgaagaaacaggtttttcaaaggcagttttctctgtcctaattgactctgggaggatgactgactgtctccacatagtgatcccctggccaggaggtcgggccctgcctgaggagggtgggcttgcagagagcaggaaggggcagagaggcttgcctcagcaggccgagaagaccccagggcctcctttccctgccatctgggctgaagtgtgggcagattcttctggtttgtgtcacaccgagtagcacgtgtttcttcccagggcgcacagcgagaagggaggacagtgctggtttctgcctggtccccatgtcttcattatagctgtggggcctggtgtcctgtagtaaacagtcagatatgcttcggttgcctgaactaaattgtcttatgccttatttattttttccctttctttataatcatcacccccacaaacatctgttttaattggtaacaaaacaaaggaaatagcaaccttgggaagttgctttgttttttccttgtccggaagcckttcctagtgattgttcatgtttctgtctagtcaagttgcctgtcttcctgtgttgacaatgcagggtgggctgtgttgttccttctcatagggaagcaggtagatgtgaagctgcctccctctcacctgggtctcctatgtatcttttgggggtttgacctatggtagcactgccattctttgtacccctgcctccttytctggggtggrgctgctagggagaggccccctggctgttargactgatttggggtatcatcttggggcactgatgtgttctgctcatgtgtctatatacctgtccatctatgtttcaagagtgattcgtgcccagtatggacattggaaactgcagatgggtagaaggtaaagagggcaggtttgagacagaatcttgctctgttgcccaggctggagtgcagtggtgtgatcacagctcattgcaacctctgcctcctgggttcaagtgactcttctgcctcagcctcccaggtagctgggattacaggcacgcgccaccatggcgtggctaatctttatgtttttagtagagacagggtttcgccatgttggccaggctggtctcaaactcctggcttcaagtgatctgcctgcctcggcctccgaaagtgctgggattataggcgtgagccactacacccagcctgccttcattcttcttaatggccgtgttgcattttatagttggcctagactgagctttacttttcaggctgagtattttcatttaggattgtgggaccttatttgggaggttaccatacacgtttcgagcttgctttaaatattaattggtgaagacataggatagttcagcttggagtgggatttgcctcccaggtcaaagggttctgttttcttagtgaaccatgaaaatgatgaatttgaattttgaatttttctcctctctcaggggcagataagagtagccaagaggcgggtcgtgatggcatccctctacctggggacaggtcctttggaacaggagctggtaaggtttatggggagatggttgtggcagcaatagtgaatgggccccaacatgccacagctttttgtgccatgcagttggtgtggagctgcctttccttggcctccatgtcagagccagctcttgtttttgttgccccagatatgggcatgtcaggagggcctggtgaggagagcatgggggagggcctggtgaggagagcttgaagaggtctggtctgggccttctaggcctcactggcagtgtcctcctacccacacagggccccaggcagctctgtctgccagttsagggcttggccgactgtggcctgccacctgttatggtgtagactgtgagctaagaaagaatggtttttacattttcaaataattggggaagagaaaaaataatattttgtgacttatgaaaactttaaatttctgtattggtaaacaaacttttgttggaacacagccacactcattcatttgtgtattgtctgtggtcactttcatgctgcagtggcagaacggggtagttgtgacagtgcccatttggcccgtaaagctccaaatatttacyctctggccgtttacacaaaaggctttctgaccctgtactagacaaacggacctgagtgcaagttgggctggctggctcgttctgccaagggctggtgtcaagtgccagggctgcggccagccttgtttccctcggacttgctgttgtgccacacttgtcacttacagtgagataggtgggtgggaaggagccagcagtcaccaggtttatatgaggtgttggggccagcgcaggttctggtgcatggcgggatctgaggctcagctgaagtgagtctgtgaatgagatcactgctttctcttgggtctcctgggattgctttccgctcggtatagtgaaacagacgggcccattgcccagagttagtgccgtttcttggtctgtccttgttcagagttactggtgggagctatagggattggagtgtggagagggaggtgcagtgggttcacacctcccctttctgcctctcctaggaaggaggcctccctcttttttttttttgagacggagttttgctcttgttgcccaggctggagtgcaatggcgcgatctcggcttgccgcaacctccgcctcctgggttgaagcgattctcctgtctcagcctcccgagtagttgggattacaggcatgcgccacccccccagctaattttgtatttttagtagagacggggtttctccatgttggtcaggctggtcttaaactcctgaccttgggtgatgtgcccaccttggcctcccaaagtgctgggattagaggcctgagccactgcgcccggccgcctccctctatttttaggatataccctccactccaagcctggaagcctgtgtgttctcatgggagaagaatggaatgtccgcactgcggagagtggccagtgggcaggccgtgtcttggattcattcatctgccaaatatttactaagcactctttacgaggagggcactgttggttgtgtctgtgaggattgtctgtgttgaaatgtacgtgagacctggtgtcgtagcgtttccagggtggcacgggctggctgtcaggcagcacgcctctgcctgcaggtccctttccattcctggaggcctgggccgatcaggcccctgggtgcttcttctgatgatcatgaaggtgctctcagacagatagcttttgtggtgtyggtgtccgagtgctgatggcacaaacctatctttggagaagatgacgagggcactagccgatggggcgatttgtttttctttaaatacacacacctctttgggtcttaatcttcttttctgtgttctttcttggtaggtggactgcctggaaagtactctagaaaagtcactccaagcaaagtttccttcaaatctcaaggtctccattctcttagacttcacgcggggctcacgaggtaggtggcatgcaagyctggcccctcctgcttcctgtgtcagatcctcagtcccaagaggggttactgtcaccccctcatccccaggcagagwcaaggctatttgaagatcatccaagctggcccagggctgcctgattgtgtgagttaggatttttttctkcagcaagtgactgaaagcccaactaaaaacagcttaggcaggagccgagtgcagtggcatgccctgtagtcccacttgcgtgggaggctgaggtgggaggattgcttgagccaggagtttgagtccagcctgggcaacatagccagactttgtctcatgaaaaactgccttaggcaaaaagactttttgtggactcctgtgactgatctgctttgggtggcttgtgatttggggtttggccgtgtcaccaggattcatcccctagctgtttcctttgggctggcttccttctcaggctctgtgtggtggcccctggtggcttargcttgtctccccatgacaccttgtcttttggaagagtctgattccatgagaatcgggtcaaagctcctgactggcctgacggtggcatgcccagctgggagcttggagtgtgccgagtwgcccagcccaggcctgcgtgctccctcatggagctgggggtgaggggcaaggtgggtagggtcgtcttcacccagagcagaaatgctgcgagtgggtggggtagtgccccaggagaaggttgggtgcagttaccaggagaagggtgaatgggtgctgtgtggcaagaagagcaggcgtctgccacgctgaggacttcaggcctgagacatggccagcatgcaggacagaggttggcctggaagtcctctggctaggagtagccccagctggtgtgactgattcaggtggacggcacaggtgaaggcgaggccacgtggaggtggctcctcattgggggcaggacgccttcctgttgtgagtcaggtgccgttttctctgtccrtgttcaggycggaagaactcccgcacaatgctgctcccactcctgcggaggttcccagagcaggtccgagtctccctctttcacacgccgcacctccgtgggctgcttcggctcctcatccctgagcgcttcaacgagaccatcggcctccagcacattaaggtgtacctcttcgacaacagcgtcatcttgagcgggtgagtgcttcccacygtcagtgcttttgccctcctgctctgcaggctggagggcagtggaataggaacagtgggaaacccgttcccctcagtcttggagaacctgcttgtaggtctggctgctgtgcaccygcrgcacctccccgacactgtctctgccactgaggctagaattccccgggggctgactggaagccactgttgacagggcacttagtctgtgctggccactcaggtgtgttgtctgtttccaccctcagtgaccctctgtagtattttcctcactgtgtacatgtggaaacagatcagagaggatgagtcactttgtcaggtagacagagccagaaaaataaacaagagtcagacctggaagtccaggtccttaggctgataaatatgggccctttcacaggccctcccctcggcagtggggccaggattgggttgctggtgctgagagaaagcccttgattgcatccttgctctgggactgtaccagtggcagctgtcacttagtgggacagagagaacaaacaaacatgggcgctgataaatagccctgcatgggccgggcgcagtggctcacgcctgtaatcccacattttgggaggctgaggcagagggatcacctgacgttagaagttcaagaccagcctggacaacatggtgaagccccgtctctactaaaaatacaaaaattagctgggtgtggtggcacacacctgtaatcccagctactcgggaggctgaggcaggaggatcacttgaacctgggaggcggaggctgcagggagccaagatcatgccactgcactccagcctgggcgacagaatgagattgtctcaaaaaaaaaaaaagccctgtgtggttagttgactttctgtgtctgcatctcctcttctcagctasactgtcggctccttgagaggaggaggctgtgggtcactttgctgtgtcaccttggatcaactctggctttgtcttttgcacrtgttcattgctgagtagctatttgttaactgcatcttgacctgagtttgtcacccccctgctagttcacctgagacctgggtcaccaggacacgctgctgcatacccttgcctgagtcctcctcacctgcatcttccctccctgtagtgcaaacctgagtgactcctacttcaccaaccgccaggaccgctacgtgttcctgcaggactgtgcggagattgccgacttcttcacggagctggtggacgcggtgggggatgtgtccctgcagctgcagggggacgacacggtgcaggtggtggatgggatggtgcatccttacaaaggtaggggctgccgctgacacccttctrtggctgtgggtggggtggagtgagggcccgggagagcacaactctaggtggttctgccacaggcataggggacttgggtggcaaggcttcattctgcttttgtccttgaagccagacagatgtgactcactgaccatcagtcatgctctgtgggtgagagagccagcccagaaaggtgggagcttgggcttgggactcctactccttgaggcagagtcactcaggtttgcactacagggagggaagacgcaggtgaggaggactcaggcaagggtatgcagcagcgtgtcctagtgacccaggtctcaggtgaactagcaggggggtgacaaactcaggtcaggacgcagttaacaaatagctactcagcaatgaacacgtgtgcctgggcgagtgacccagaagcctgccctgcatcacaggaagcaaccaggccagcagctgttcgcctagggcccatttccccaagcctatcacctgggcctgtggctcccagctcccttgagctctgtggccccctgcctggaaaatgaagtggaagagctctcagctctgcccactggaaccaggcaggttctggcgtgagtgttctggggcatttgcattcctgtgattcctgcggctgtggctcccccatggcctttagagagctgctgctggatttgcagcagtgtctgaacttggggaggaggagctgaagttggaacttgttgggagaagagctctctgcgtcttgtggacctagaatggaagcatttcagtgggccgtctggtggaagccctgtccttgtgtcaggggagccctgggcctcagaccccgaccgtgatggtgtgatgctctgcctgccgccatgcactgttcctactgttgtattttgaatttcatctgtaaagagcttgtggagctctgtatctctcttgctgagtgcctacctagcatcctcagctttgccttttggcccagaaagcctaaaatatttaccatctgacccttaaagaaaatgtgtgtggatccctggtctaatgtaacgggccaggcatggatatgagagaaaacaggccatgcttaggccaggatgagagccagcacgctcggagcaggagcggggagactcgagcccagctgtgcttgggagagtgagtccacagagaggctcaggggctcaggccccccggtgctcctccctcccgcagccctgtccagcatgtggcagtgtgactcctttctcccctggagggtgttggcatcaacaggctagactcctgcatgggatggtccttctctttgttctgtagcccagccctgaaaggcactgagtgtctgttcctgcccccarctcagaccatgcaagccagcaaggatgacctgggacagccctccttccctgtttcacttccctgatcagccttgccaaagccttgttgttttatcaatcctttatcagacaatcaactttggacagttgatattctccatttttgtatcattttcattctagtaatttctattcatatatatatatatacacacacacacacatatgtatgtatatatttttgagatggagtttttgctctcgtcacccaggctggagtgtggtggcacgatctcagctcactgcaacctctgcctccgaggttcaagtgattctccagcctcagctgcccgagtagctggggttacaggcacacaacaccacacctggctaatgtttgtactcttggtagagacagggtttcaccatgttggtcaggctggtctcaaactcctggcctcaggtgatctgcccgctcctgcctccgtaagtgctgtgctgggattataggcgtgagccactgtgcccggcctgttcttatttttattttttgcttccctatactgtattcttggttttattctgttgtttctttcccctgtcttcctgagttggatgcttaactcattaattttcagctttgtcttgtctgataatagcatctttcccttcagtgtgtctgcatggtcacctgtcaccagtgtcttgtccgaatacaaaaggcaccccatgcagagcctgagcctgcccgttcttcctctctctcaggcactgtcactgctgtgggaagctttcccacatggtgatgtgcttatccaaggtgatggcttgccctgtgaccccatctgtggaatacgcatgctccttttttggttatacttgcatgtctttatttgactgagcttccttattgaagtagaacatgcaccccgagcaccagtcgcaggtgtacagccatgaacctgctgctagtggacctgcttcctggaggccccccgtatgtcccccccaaggaattatcccaaaggtaaccactatcctgatttctctccctgtcagtttgtcttgcctggttttgagcttgtttgtaattggaatgataygtcgacatgcctttcacttctgcctgagtgtgggctactgtggaccaggcccttgtcttgggcaaactatatccccagaggagcctcgctctgggcttggggtcctgggcccactcagcgagtgttcagtgaacatccagttgtagcrtctgcacttgcctatcacatgccctgtcccctgagctgggcagagtccagaccctccatttctcttcccttcactcttctttcacgtcttccccaggggaccgggccgagtactgcaaggcagccaataagagggtcatggatgtgatcaactcagccaggacccgccagcagatgctgcatgcccagaccttccacagcaactctcttttgacccaggaagatgcagcagctgctggggatcgcagaccagcccctgacacctggatttatccrctgattcagatgaagcccttcgagattcaaatcgatgagattgtcactgagaccctgttgactgaggcggagcgcggggcaaaggtctacctcaccactggctatttcaacctgacccaggcctacatggacctggtcttgggcactcgggctgagtaccagatcctgctggcctcaccagaggtgaatggcttctttggggccaagggggtggccggcgccatcccagcggcctatgtgcacatcgagcgacagttcttcagtgaggtgtgcagcckgggacagcaggagcgggtccagcttcaggagtactggcggaggggctggacgttccacgccaaaggtgmgcagcggctggctggaggacgttccagtgtgggacagccacaaacatgggcagggrgtgggragccctggcgcctasctgttaragtgctgtasttctcccttcctaccttcccagcagcccttgcaggcacatcatagctgtcccatgacttggggagaggcgagcattcatctcctcaagggaattttttttttttttttttttttgtgacagtcttgctctgtttcccaggctggactgcagtagcatgatctcagttcaccgcaacctccacttcccggttcaagcagtcctcccaccgtagcctcctgagtagctgggactacaggcgcgtgccaccatgtctggctaatttttgtatttttgtagagatgggattttaccatgttgcccaggctggttttgaactccggagctcaagtggtctgcctgccttgcctcccaagaagtgaatttcagttgtgtaaaatccgtctcttttatgcatcaaagactgtatatggtcacattatttggtggctgtggtaaagatgtggtgacataacctctcctaagagatggagaggaacatgccttagctgtgagatggaatgtcactcttgtcgctcaggctggagtgcaatggtgcgatcttggctcaccgcaacctcctcctcctgggttcaagcgattctcctgcctcagccttccgagtagatgggattacaggcctgtaccaccacgcctgactaattttttatttttagtagagattgggtttctccatgttggtcaggctggccttgaactcctgacttgaggtgatccacctgccttggcctcccaaagtgctgggattacaggtgtgagccaccacgcccggcccttagccttgtgttgattgtcagagttcctgcttgttggcaactttttttttttttgagacagagtcttgctctgttgcccaggctggagtgcagtggcacgatctcagctcactgctacctctgcctcccgggttcaaatgattcttgtgcctcagcctccctagtagctgagattacaggcatgcaccattacgcctggctaatttttgtatttttagtagagatggggttccaccatgttggccaggctggtctcgaatgcctgaccttgtgagccacttgtctcggccttccacagtgctgggattacaggcgtgagccactgcgcccggctggcaatgcctttctcagggagaaagaagattcattagggatcatttgttttggcatcagcagcccagttttcttgtcttttcctcactattgctattgtttttttccctatatgccaatgtctgccttttttccccatagctgaggaaatggaggctctgtgcacagtcttgctggtgggggtggtaggaagagggtcacactctgcaatgcatgtttatccctctcaggcatctggcggagcagccgaaatggggcagaatcccaggggcagctctctaagacatgggtataacatgctggaaaccctgtgcttagcagtgggcttactgcatggcctcttaatgctgggagggtgcccgcctctagcagcgggaccatgactcctttctgacgctggggacccccaatcctggagctagtctgtctagagaaggggaaatggtgcctggaggcccctgtgccatgagtacatcccacggcttttctggcttctccctgggcagtccagaggcctgttttgctccttctcttgtcctggttctagtggctttcggaagagctgagtgagtggggggcctccatggatggggaatctaggctgtggactgcagtaggcacacagctgtgttgttgagactcgaggcatcttccggtgctcaggtggtttgtttttgtttttgttttctttaaaccaatgtttttcaattgggggatgcgttgtaagaawtactgaagccrgccaggcgcggtggctcacgcctgtaatcccagcactttaggaggctgaggcaggcagatcatgargtcaggagatccagaccattctggctaacacggtgaaaccctgtttctactaaaaaaatacaaaaaattagcggggcgtggtggcgggcgcctgtagtcccagccacttgggaggctgaggcaggagaatggcgtgaacccgggaggtggagcttgcagtgagctgagatcgtgccactgcactccagcctgggcaacagagcgagactctgtctcaaaaaaagaaaaaaaaaactgaagcccaggttcccctagactttcatccacctctgtggggattgaacccaccatggtgtttaaaaaacgcccctaggagattctgatgcctagcctagccttaagaaccactgtcccagcttggaatgggaagcttctggcatgtccagggcatcccacgtgctgctttgaggcccacaggcctgtctaggcaggtggcattgtttggtgtgggaagtgactgccacactgtcctgcaggacccatcctggcatgtgttgtggctgaaccaggctggtggtcagtgtctcagggcaggtggccccagcccgtggcgggtgtggaaagtatttttggattggcgttacttctgggaataacagcagtacccagggatggggtattgaaagagttggccagtggggcagctttgacctttggggaggcctcagacccacactgtcgtgtgctggagaggtgcagaggagtggctaggcgtcgctctcctcaactgcactgtgctggaacgatgaggaggccccttaactcagcctggagggtgggaggctcctggcctgtggcttctgactctgccacgggttatttccctgaagtggctttgataaacgkgagctgactccccagttaccgctgaaacagaaacacccaacctgcttttctggggcgtcttgccttttcccggactgatgtgcttctgccactccctctctcctgccctggtgtgggtggtgttgggtcggggcggggggtgccctgcaacccaggagtgctggatgagtgggaaattggggatgatcttacagctggatcccagggcacgtgcccatgtgggggatgggattgggggagagttggcagaggtgggtgagggatggatggtgtgtggagggggctgctgctgagcagaggggcttcaccctaaagccaggaaccagaggtcagaggtcacttgatgctgaagtgagaggcgagggtccttccctgctcagtggttgtgtccccagtgggatcttaagtcagcacctcttcaggcccatcttttgatggtcacttcctccagggcagcgtgtgtcaggtgagagatgagtgggcagccgcagggtgcttgtggatttcgatggctggcccagtggaccattcatttcctgactgtctgccctttgcaaggcacttgctgggtacaggctctgtgcctccttgggtgtgtctgtgtttgggccccagaaaattcctgccggtggctatgcactgatacctccactcccttactcaggtcctgtaggacaggcctgggctgatctcagctcctcctgctcccagaagcccttgggcagagacaggtagccaggactctgtggattctagatccttgcccctcagacagcactctgctgtcagcacagcactctctgggagccaggcaacaagaggcttcacggartgactgtgttgaacttgctggtggccccatgagtgtggtgatrcaaggaagagcagcgtggggggaagaggcaccttctcatgtaaaatgaccccgtggctcagcagctgccagtggatttcartgcagtctggtgacagaaaattcagagggctggcctttattcttaagggttttctgtgttgtcaagtattgccaggactgtctggcagttgcttagatgccttgttggaaagattcttgtgtgataaccatttgccgatcgttcaacagcctgatacacctcttttgcatactatgctgatttcttaacatattttatctatcaatnaatcagtctatcatgtatctctatcacatttcaataaattgagctgtttcaaagaaccagaggaacactcaactatttaaaggcatgcactagagacttcttttgcaatatggtttatctatttcattcttatttggatttttgtaaagggtgcctattcagaatactcaggagaagccatgcaagtgtgatttggcatagggattactagacttgaagtctagaagcctggttctgagtccacatttacctgtggccacagctgaggggcctggcttaacctctttcctgtgcagtcggggggatggctctagattgtcaggaggacacggggaacagggctgatatttgactttctataaaataaccgtatggttcctaggccaggtgaggcaccttggtggggcgcgtggaggttgaaatcacactgggggccgagggctgctgcgcgtccctgagygaatagattggcagaagggagtggggtgggggccttggatcccttggtgccgtgtctctggccttgctccctgtagttctgttgcgctgattcggtcgtgaaggaaggtgctgccaggccgcttcacctgyatcgccttggctttgggaggtggggctgagtgggcatctgggttggatctcaggcaggtggcagttcctctgattcatggttgtcagtttcctgttgcctggccctygctcctcgcccagtaggtgtggtgggacaaggttctgggagctggggtagaatttggactcttaacgggaagtgcctcgtgctgccgcagacacatctggatgggtgctgagctttccttcccaagcctggtcctgatcgggggtggggtacaggcaggagcagcccggccttgtcagccgttgaaagtgtggtatctgctgggttgccagtaagctcgcttcgaggtcttgagaggcagtgcaggggaggctgagtatgaaccgtgtcaagccagttcttatgtctctcttcatctttctgctccatggaggtgagggacagagtgagtggtgcccatcccattatcacattcaggcaggaaccatgctgtgctgagccaggctgtgtccatctgctgggacatgggctctgccctccggcgtgcatttcatgaggaagatcagaaagtgagttttagcatgttgacttccatttcttctggacgcagtattctagcactaacaacacaatgtgggtggctagggcggagcaggtgttggattaagagatttctggctcatgctgacagggaaatctgttaatggttgtgagaatgtcactatttttattgccttcctgataggccaattggcgttctgcccaaaggtgaactgatggtgagaggcgggcagccccaccctgtttgcctaggccacacgtgaggcggctctcccctgggcacccagtgggtgtggtaggggtgctgtgcccgtgcaaattgcttgcttcaggctgagcacacacaccagcctgtgggcccttacagtttctcagagctgtactaatgtcagagcaggtgagygcttatcctgtaaggataagcctgtgatgtcttctgtcccctccgtgtttttactggagtctgagaaccctgtaagatttattgcagaatactgtgggagygcttgagggaggagtatgtgttcatgcatgtactcttaaaatgttcatacacttctgccttagaactgcaaaggcctggcgtggtggctcacacctataatcccagcactttgggaggccaaggtaggcggatcacctgaggccagaagtttgagaccaatctggccaacatagtgaaactgtgtctctactaaaaatacaaaaattagccgggtgtggtggtgcatgtctgtaatcccggctactcgggaggttgaggcatgagaatcacttgaacctgggagacggaggttgcagtgagctgagctcgtgccactgtaccccagtgtgggtgagactccgtctcaaaaacaaaacaaaacaaaacaaaacagaaaaacaaaataggccaggtgcagttgtgacttacgcctgtaatcccagcactttgggaggcagaggcgggtggatcacctgaggtcaggagtttgagacccagcctggccaacatggtgaaaccccgtctctactaaaaatacaaaaattagctgggcatggttacagccgcctgtaatctcagctactcaggaggctgaggtgggagaatcgcttgaacccaggagccggaggttgcagtgagccaagatcgcgccatgccagtcctcactgagtgaaaagaagaaactctgtacgaaattacaataaaacaaaaccaaaacttcagagctttttttttttttttttttttttttttttgggacggagtcttgctctgtcacccaggctggagtgcagtggcatggtcttggctcactgcaacctccgcctcctgggtttaagccattcttctgcttcagcctccccagtagctgggattacaggcacgcaccagaatgcccagctagtttttgtatttttagtagagatggggtttcaccatgatggccaggctggttttgaactcctgaccttgtgatctgcccgccttggccccccaaagtcctgggattacggggttgagccactgcgcctggccgtcagagctttttttacacttaatttgaccttttttgggagagacattattactctcagtttgtttatttcattcaaacagatatctaacaaataccagctgtgtcccaggcatcattcgggacattgggaatgggtcactgggtaccagacagactaactccctgccctcctaaggcttatactttgatggaaagcagataataagcagatgcgtctctacaaatatcggaacgagctacgaagagcagagcaagagaaggctccaggctgctgcaggatctgttacaagggggctcagggagggcctckctgaggagtagacactcgggcagttggcctgagtgaagagggagcatccatgccaccgtctggggccggagtttcctggcagaggggagagaaatgaggagcctcctcgaccacatggggcttgcagaacagcaggggcrctgggagtggtgggcactgagattggagggtgggcagggcctattggaaagggcccagaagccatggcacgctgccatggaggccaggagtgccgaggcctggatcagccttccgcagggcagtatgactgtgcagaagagcaggggcaggcgtcctttctgaagaggaggcccagagctgggaggcagcagcagtcccaactccaggtcctcctctggtgtccccgcgacacttgatttatagtgagtgagtgtggagtagcagccgcctctgcttcccctgcaccctgccctctctggcacccagggctgcagtatttatctctgccccatgaactgccagcagtcagtcccttcccaaaagcacttggtccgcagagggctgcttcctccctccccaggctatcgttcctgctgcacgtctccctcatctgatggttcctggaatagtaaagatgtcaggcccaaaggtcaggccctgggatgaagagtcgggcgtgataaccagtttacagccttggactgggaaacagatttcccgacagcgagtcccaggcctgatagtcttagccctgtgtatacacagcctgacatcctgactggtggtgcgggtctgaccggagctccagaccgctcaggcctagagcgagggagatgaaacagaactaaagggctcctgctttttttttttttttttttttttttttttgagatagggtttctctctgttgcccaggctggagtgcagtgggggtaatcttagctcactgcaggcttgacctctgtaagggcttttagattccccttctcccgttggaaacttcccagttgtcctcagggcacagaccaatggctaaaactgacttgtgagctgaaatcttgaaaaaccattgttcccagctgccctggcctgtggggcatgctggggtgtgggcatctcacagcagcaccccgtggcatctctggacctggcaggtgcttgactcatgctgtctacttagggctccccagagggcatcagactggcctgtggtcgttattttctttctgatggagaaagattgcagtgcaaataattctggcggggaagttgttgggcagtctcaggtatgttgaaaacgtgagctacctctcaaatcctgagcactcacctgctgaaaaacccttattctttctatatgggaaacatagatagacatagagactgtctacagatacgtatacagtctatcttggggtcaggaatgagcaatagatggagaagcggttgtgcgtatgatgaagttgtgcactggaggtggcctgtctgcctcagcgctggcctctaggtggcctcataaagaaccgagccagtgcttaggtggatttggcaaataaaaagcatgtgtagaaccacgcacctccagccttccccaccagattctgtggtctaggagctgtggggtggacaccgagtcatggtggcgtgacacagagcagcctgaccctcgtcacccatgtgggcgtgtggccttcctactcatcactgtcagtcttccctcagtgggctcaggagatccagctggacaagccacactgaacagacccactgttttaagaggctgatcttgtcatcagaaaagttggaatgagcaatggcaggtgggaggaagctcctgtctcaggtctgaggctggcggacgcctgccttgcaccttgtcttgccagctccatgctctggggaagagggggtgggakgggggctctgtgtacgaggggccatgagtgctgttcggcttggaccaacctgggcagcgtgagccatctggatcagagccaccaggggaagggggcagcctgcccacacctgtggtcctgtgaacggcctgcacggccagtggcccagcggagcggtactgtttatggcacaatgcacacaggccagcaagtggctttgatgtggcccttggaggggtggagacgagcccattacaggaacaggcgtagggcctcgtcacctcttacccaagatgttcttggaaatgctcttgctctgagtgaagattaggaaaccgtcttctattttaggagcctggtgtatgttacatactgtgttgactcgcccatgacagttgtgtgggtcctttgaaaggggtgtgtcagtgg[450 bp omitted]aacggggcgcaaaactgtgcttgtcatctcaggtaacacgtcagtattctgaggacgcctgtggccttgttacagaaatggcctcgtagtgtggccccccctgccacacagtggcaccccgtgccctgctttttctccaactgtgatactgactggctcatttcccagcaaaaagggggatattgttctctgggtgtgacagaaacttacagggccctttagctttctcctccattgtcttttccagccaggaagtccctgggccctgtgggcagtgatggcagaggtcccaggcctggaccccctttgtcctcacagggttttggtgcatcagcaacttgaaatagggaggctgggtcagggagactcactacatgttcctcagtcagaagggcacagacggcctacccaggacctgtaaggcagccagccttcaaggcagacctgttcttaccagccacttttgccaccccgcgtgacaaccccacatctgctggcttgggtcgcgtggttgtccttcaccatctgccgtgttgcgcgctgaggtggctgcttctgagaagcacgcgtgagctgattctcagtgctcacaggaagggatggccagtgcaggctctgagcttagcaggcagggtcagcaggtctggatgtgcagaggcagttcagagtggggttcgaggccctgagctctctggggagaggctcagtgggcagctgggcaggggtgtatgagagcaggtcggcaggtggcgtcaccatgttccctctgggaaagcctgcttctcgtcctgcttgggacacaaggccacagtgtgaatggtgaaagcaaagaccagcagttgagctgaggctgcgccctgatcctgggtccctgcttcctgccgcgccggggtgggggtggaagagtgagtcctggtgtggcctgtccgccgctctgcagcagcccctcgtgtccaggcacccagggcaggccrcctttctcttagattgcagcagcgtgtggagaggactttggtagatgctgtgctcatttcctgtctgcacgtttccttttccccgcaggcctctggctgtacctggcagggagcagcctgccctgtctcacgctgattggctctcctaattttgggtacaggtcagttcaccgggacctggaggcccagattgcgatcgtgacggagaaccaggccctgcagcagcagcttcaccaggttggtcgcagcaagtgggatttcccagggcgctgagggtgtggctggggggcccaggctcacccgtgctgtggggctgccctgagagctgtttcctgaggcaacgagtgagactcagagcagagcaagaaagactctgggtctccaagagtgcagtgatgggtggctgagccttggaagatcatgcctgtgacttcccagacgctttgcaccccacgtcctggggactttttctttctctgcactaggggagaccaccattttctccctgggaccttttccttttaagacaaagggtcaactgttaaaggttcggcattggggctgggtgtggtggctcatgcctgtaatcccagcactttgggaggtcgaggcaggtgggtcgcctgaggtcaggagttcaagaccagcctggccaacatggtgaaaccccacctttactaaaaatgcaagaaagtagccgggcatggtggcgggtgcctgtaatcccagctactcgggaggctgaggcaggagaatcgcttgaacctaggaagcagaggttgcagtgagccaagatcgtgccattgcactccagcctgggcaacaagagcgaaactctgtctcaaaaaataaaagggttcaacagtggtttcggccctcgtttgataatagtagcccattttctctttgagggagataaaagaaggttaccaggagttggtgaatgcttcgggatgaccctctatttgatgacctgtgacagtgtggttagacttttgaaatgggagcgtgttacccttttgtctgagacctcgatggtgccttgggctcatgaattcgtgacctttgcaataacacttttccatggaaggcaccaacttcccttttccattcctggagatgcagataacactgccgcaggccagagcccagaggcatcggacggtaactttgtgaagcttttatgctccagggtttgggaataactgttgcaaaattgtcagagcctttgttgatggacgaggaaatggtcactgatgtgttccctgggatctgtcctcctgcagcctgggaatcttgtcagtgactgattgattggggccttggtgccaggaaaggcttcacgaccacgacaggcgcaagaggaagtgaagcggtcatcctctgggtgggccagtggggtaatgggtttgctcaggtttcttcctacagtgaggtttacagcaaatgactgaggaagcccccacaagctgagagattccagtaatagggtgacaagctggccttggagccaggctagtgggaaagacctgagcctgcagctttcaacagcgggctttcctggacttctacttcaattgcagagagccgttcgcagagacttccactgtagctctgtgccagggcggtagagagtccttggtgactttggccaggggccaggatgggttctgcgtggatctgagttgcttgggggagcaagtcctccaggcctgtgcctggggtcctggtactgaccgtcctcccccactgccctagtaagggcactgaacccacatcctggatcttgagaaaagctggggccgcctgtggttagcagctgctttctcaaatgacatatttgggatattttctttttcttcccaaacctgaatctcaggggcttttgcctgtgggagggtggagggtggtaggtctgctactgtrgctcttccattctttagggatagactgatttctctgcctgtgaaacgcagaaatatgtttccagataattccacctatgcttatatactgggacggcagctgctctcctgagccctacagtgcccggtccctagaggccaaatcctgctgggactgcccagcctctagcctccccacaacccagaaagtccctaaagccccagccaccgtgggctccctgctctctgaagctgtctctggagatctgcttgggaattcagggaggggccctcctattcatgtcacattgggcactgggaatggggagatatttttatcagaatctgaagcccctccctccacttagtacatacaataaacactgaaagcttcctggttttgttcagggaacacagtttaccacttgtgacccaagaaagactccctcgaacagcgtcgtaacctcgtcagctgacttccttctccatccctgttgtggagtctgtgaggaaacctaagtgtttctggtaatttagttgcaatcttggccgggtattcatttgaagacacaaagctggagccaggtctgtggagactcctgcaaaccagccccctgagaccagagctggctcttccatcaggcacgtccagccagggattgggacctcagcagcaattaggaggccccatgtctgtgacacgcggggctgcggggctgctcagttgggagtgtggcatggacccacgatggggcccactgagcatgggacgggggcagggggtaatgaagtcggggcctggctttccccagctcttgatgggaaaagccaaggccacattctgtagggttctggagtgtggggtgaccccttcctgaccccccggggcagaggagttgccagggctgtgtcctccctcccggcctcctgagcagggagtgtgccactttgagtggcacaggccaccgctgctgctgtcctgcggttggcactgtgcttctgtggtcatcacctgtggtcctcacggcggtgtggatgtaggtatggcccggacattacggtggagagcgctggagactcagtggaggagagagggctagagtcgcggtgcaactgtgtgagcgctgccaggcgccccactgaggacactgaggagagagcacttggagggcagactcttacaagagaagcttttcaaagatcccaaacaccatttcggacaaagcatatataaattttttttttttttttttttaatggagtcttgttctgtcgcccaggctggagtgcagtggcacgatctcggctcactgtaacctctgcctcccgggttcaagcgattctcctgcctcagcctcctgagtagctgggattatgggtgcatgccatcacgcccggctaatgtttgtatttttggtagagatggggtttaatcacgttggccaggctggtctcgaactcctgacctcaagtgatcctcccaccttggcctcccaaagtgctgggattacaggtgtgagccacygcgcccggccgcatatataaatgtttttaaacctgtttttaaatatgaaattaacatgtgttcactataaaaattaagaaaaacrgaaagaaactaaccctttctgtagggaaaaccactgaagccattgtgatgattggcygcctgccttctgtgtacagcgcacggaggcacagctttaagcatcagatgacgattctgtcgtgtgtgtgtatttcgtgtccagcttcctttgcctgccgatttctgggcactttcccatatgattaggtcaacactcttctcatggcgaaaactggtttgtcatatgagttgttaataagttcgtggtgaatgctggtttgtcatatgagttgttaataagttgactgttggacatttaggtggtttccagtttttccttgttataaatattgtgataaatatctgtatataaaaatcttagcgcatagtgattttcttggggtaagctcttgcaaagggagctttataaggttcttgatacctgttgccagagctcactctagaggatgacttgtcccccttgccctcagcactaagcgttcatcagtgtgggggataatgacatcacagatgtcattggcacaaattggctttgtgccaatttgatagaagaaaaactgtgtctcatttaaaaaatacctcattttaatatgcattacctcgtttagtgagggtgaacatttaaaatattttttccaccagttatatttcttcaactctaaattgaagaaatttagagtcctttacatgtcttggtcttaaaagccttttgggttttttttttgagacaaggtctcactttgccacccaggctggattgcagtggcagcatcacagctcatgcagctttgacctcccgggctgaaacccttgcctacctcagcctcccaagttgctggggctacaggcacacaccaccatacccggctaatttttagaattttttcatagagatgatgtcttccctgtgttgcccagggtggcctcagactcctgagctcaagcgatcctcctgtctcagcctccaaaagtgttgggattataggctttagccactgtgcccagcccttaaaagtctttaggaacacggcttcttagcttttctaaggaatgtttgacagtggcaacttgtagggcctggccttgcctgccaccagagcaccctgggaatctctgggccaggtagacatgggaastcagggttttctgggctggcctgaggggctgggctggggccagccggccatgtggtgtggtgctggaggggactcctcactattcctgtctgttcctcttcctcaggagcaagagcagctctacctgaggtcaggtgtggtgtcctctgccaccttcgagcagccgagtcgccaggtgaagctgtgggtgaagatggtgactccactgatcaagaacttcttctgaggacagacaggtgctgtctctagcatcacctctcagcacgattttcccgagagttcacaggtggggcaggtggttgttctgactcaaccagagcttccagagggctctttgatccctttctcagttaaacacagagcagcatcttcaggggtatggcagctgtcctcaaagttagaagctggatgctaaattaggcagtctgttcactttccatctggtacccactccactaagtcccaaggcgcctgtgctggggtcggcagtggcagcctgtagtccccttctgctctcccttcccagggggtcctgaagaagccctggggcaagggctcagggatgagggggcagaaaggcagattgagcccctccaagctgagcacactggtgcaggagatgtagacgtgggaggaggggagcacgtttgctcgtgagagtggctctggcttgctgccctggccggctgtagtgcacagggtggggcgtcggtagagccagaccgtgggctgctgcctggacgcctcgctgacatccctgtgctgcggttacagagctgcgcccttctagactctggaagttgagtaacaggacctgctctgcccacccaggaggggcctgccgcttcaccagaggcaccagtggggtcccacagtcacctgaggtacccctggactgtcttgacgcctagaggtccgggcagggggtggctgccattaaaggtggggtctttgctgagtgaccttttgtgtcctggatccctcagggcctggactgcactccgggtggggtcaggctcccgaggcccctgctctctggttctggatgttgtgggtagttctgttgctttggatggctgggcctttggatggtggcttgtggggaagggacggtgaggagtcaaagatgagccaggacccatgtggccggcacatgcgctagtgccggcatctcatgtgtgcagcgtgggctcccttagtgcctggcaccttagtgctctgctaagtctcattgtttaaaaatgtgtagtttatctgcagcttttcctagttattttaattacttttcattttatttgaatagtgtgtgcaaatgtagagagtaaaacaatactgcggccatttcctgccctcccttcccccaggcagccactcttggcttgtttcttctgatgtgcacacgtgtccgtatttctaaataacgtgcatatcctgctgtcttcccccaaaatgtgtacttaaccaaaacagcaccagtgtcactcctgaaacaaaaattaccaagaatgtcttagtatcatcaaatacctaaatggtgttcacaattccacttgccttaaaattaattttttcgattatttgacttgaagtccaattaaggactacaccttgtgattgttttttccctagcaatttattttttgaagaatgaactttatttttattggatctacttaaaacatttttgtgtcacctagtagcaggggattttgaatacatgtcatgtgtgtttataaagccagctctccatatcccccagtgtctccaggagctgcttttgtgacctcactgcctgatctctttatcatcttcaggtgcttgacccttgcacagagagaagcttcctgggctacagggcatggcagcctgtcctttcggggagtgagattagatttagtccytgcactttgcctctctagaagcagcttctcgcctttccctcccgagggctggcaggagtcactgtcagtcacccttcatggggtctgaaaggttgcatrggctcacctggtcttagacaaggacagttgcagcttccgcaccaggcagacctgcagtttgagtggctggggataggtggagcggcggcctggccacagtgccctggacagcagcacatcacatcagttaacactgtttgccttccaactagttattacggtgtcctgtgggacaattagactggaggagccaaaggaatgtgcaggggcactgggtttctgtttggagagaggctctcggtaaacagagttcgcattcctccagattctgtgggaccagagtaaatatcattatgccacagccaggcttaagcaatctatctgcagtgccgttcccgcagcgcacactgctccctctgtctctgcygatgaccttcgaggctgtcctaggcaggttctccctgaggagctccccacaccaagcctccctaactctgcaaagcagccggagcaacagagagcagcgggcgggcggccgccgcagtcctcccggctttctaggtgcgcggggctgtcgtgttccagtccgtgttccccgtcgctggagtgcagcttaagtgcgaatcatttcttggaaagtttagagataattttgtcaactacccacaatatgtatgtgtggactagattactttcttatttcaggatctaaaggcaaaatggaaaaacgtcacattttgtggttattaccagggactgaagtgagttgcccggtggcccctggtggctttagctcccctggtcacctgaagggctgcagtgacccctcctggccagcagaggtattggcccagccaggctgggggaggctgaaactgcttcccttctctgcagccacaaagggctggattccttgggcgccaggaggggaggatttttcttttccctccgatagccctactgggcgctaagattgttgtgaatcattaccctcagaatttggactttctagrtgcttcttaacccatgatttaggtgagtaaacttggaaaaatgtttttgcaaaacttgatgatcaagctgaacgtagaacgatattcctaatgggtgtgtttgccttttttcccccttttgagacagggtctcactctgtcacccaggctggagtgagtggcatgatcatgcctcgctgcgtacttgacctcatgggctcaagcgaccctcctgcctcagcctcctgagtagctgggaccacaggcacatacaacattcccagctaattttttgtatttttgattgatagagatggttttgccacgttgcccaggctggtcttaaactcctgggctcaagtaagattgccgtcctgggattagaggcgtgagctgctgcagcggcctgcttttctttgaagcctgagaaatgttgagggccgggcacagtggttgacacctgtaatcctggcgctttgggaggccgaggttggtgaatcacctgaggttagaagtttgagaccagcctggccaacatggtgaaaccccatctctactaaaaataaaaaaattagctgcgtgtggtggtgggtgcctgtaaccccagctacttgggaggttgaggcaggagaatcgcttgagcccaggaggtggaggttgcaacgtgagccgagattgcgtcattgcactccagcctgggcgacaagagtgaaactctcactctccctcgaaaaaaaaaaaaaatgttgatcctgtcttggtccccctgggatccgtcttttctgacgtttgccgctgtctcccctcatcccccaggttgctagttaattctctcccctcgtgcctgcaccctgctgccctagctagcctggccacctcactgccgtgtcctgcatcaggccagccacagagtcctacaggtccggggcttgcttgtgggaacggcttgttcttctagactctgggggcgggggcttgggtgtgtttccttacttgtaaaaggtcctgttgtttttgggagcagggagtaatggcggatgagacgctgtgtggaggcggcagctcctggtatggggtaacgccctgtcccctcattggcaggtggtttgcatgaagcatcaggccagagggtgtgagtgccaagccctcaccccacatgctgctcctgttaaaagcaaactccactgacccccccgggaagtcaggatttgggatttacttcctggaatgcttgcctctggctgctgggaattggggcctttccccaaagcctgaaccaggcctcacagtggccatcaggcacagaatggatgggcacagctgagtggctccactggctttaatctgccccacctcttccacaccaacctccaccctctggttccgatgtgcttggttacaaagcacctgattatttaagagaacraaaaaccaccaccagttcctgtaaagaataagtcacaggtgcacaggtgaagggctkagttgtggtccagccccagggagtgtggsctgtgaggcaggagcgagctaaacctgtaggagcagcgccacggctgccaggatccacttcgctgccttctctttggtcttcaagttaaaggtccagacataggtggggccgcggatgcgtgttttgtacacgggacactcatagatgttcttggtctccatgcggtccacaggaatggccttgatgaagatgacaggcatggccggggtcagctctttcagccgcgcttcagcgatgactccagtctgggtgtcccagcgagcccctgcagggacagtatggctgagggtcaggtgtgctgccagtaagtgagggaggggctggcaggaagggtggggtcctcacactccccgccctctgcagagctgggctctaccccaaaaggcttcaggccagctgccacagctggaagcagaggccttcgtaggtgatggcctgcatgttgtaactaccccgtcccgctgggctcaaggaacagctcagctaaagccctcgggttccatccgtttaaatctgtggcattttcagagcctcatctgtcagccttaatgtcagtggcaggaagtcataactccagctaaaaattacagagtaaagttccctgattcttaatgtgtaatgtctgccctatgtgtacatacacaatataattatacatctgtgcatataaatattgcctttaaccagactgctattatttctactcgccctatttaatggtgtttttatttcctgtctgaaatctcaaaataaacaaacatggagagcttatctttggttgtgtgggaaatggggtgcctgagccgttgctggcccaaccctgccaccccacaggtaatggggtgacgtcagctgttgaaggggacaggtatgtggtggtggcattgctgctcaactcagaggcgggctgagaagatggccggcctcggtgtcctggctgacctcttctgtgtagcaggacaggggtgatgtgggggcggacttctaacaggtgccccagcctcttttcccttgaaccctgtgttccaggagtggcagcagctggggagtgggtgagactgggccagccagcatgacctggagtctcagtgcagccacaaaacgcacttctgccctgggctgactgctccgtggcagggaaagcctgggcttttcagcgcttttcatcacgtcggagctgctctctcacaagctctgctgttttcattaaagcagaggccaggtgactggggtgtttttggtctcctccagaccctgcacattccctgaatcctctcaaccctctctagggtcagcgtggctctgacctgcaggctgatgccccctgagagcacctctctcctgcctgtccccacagctcttgaacagcctgtctttgccaagagctagttttatcttgtcttggcaagtagcactggctctggaagcttctgcagacagacaagagccctccttaccttccatgaagagtccrtacacgtaggagccctctcgyggrggagcggtcatgtcctctcggtttttcttggtcacctcgacagacagacacatcttgtccaggggccactcgttcttcctggccatggactgcatgatggccgtgaggaacgactgggggttgaagaagccggccagccacacggtggtgggcagggcaaagtctgtcgtccaggcctcgagttcctgcaaggacacacgagccgctaggaggagaggacatagaatgacatgggaacgacmgggccttggccgttctgagcaggggtcacgccagaaccttccacgggccactcagcgagctagaagtgctggacagagtaggggccatggagcccagccacctaccatgacgcaactttggtgtctgctttttttttttttttgagatgaagtatcgctctgtcacccaggctggagtgcagtggtgcaatcttggctcaacgcaacctccgcctcccgggttcaagcaattctcctgcctcagcttccagagtagctgggattacaggtgcaggccaccatgcccagcttatttttgtatttttagagatggggtttcgccatgttggccaggctggtctcgaactcctggcttcaagtgatctgcctgccttggtctcccaaagtgctgggattacaggtgtgaaccaccgtgtccagctgctgtttgctccattttaaacaagggaacaggtagagaagggtcaggaagaaaatggcttcctgtttgtggataatttaggagcccaaagaggctcttgccttcattgcctcgctccttatagaggacggcttaccctttgagggtcgcttgaggaggagctgatggaagctgctctgcggcctggcttgttttcctcctttgggaggaaatggctgcactgtcagggtgtgggaggggcatgggctaggcccttctggccctgatctgacagaggacaggcccccaggagcctcctggccatgctcctgcaggctctagggtgtggggygtgccgagctctgggcactcggtccccgagtcttaggaagcctctcagagaaaacggmacttaccctgatgcggagcagcaggtctgcgtaccaggccgccaggcccatcatggaggggtaggccygggccacccacgtatcaggcacggtgtcatagaagagagccgtggacagatcttccacgtcggtcgtgatggtcagttctccctaggagacacacagatgggtgtggggagccctgagctggggcctgggagagcaccagccccagtgcgtgtcatgagttgtcaacacagtgtggctttgtgctgcgcctctggagacgccctgcatcagggccacgcaagcgcttcctgctaaggaacggtctagatgagctcccggggcttgttctggaactgccagagctctggagagggagcagtaccatgctgatccggggcctgtgctaggcctgggttgccagaggcctgggtttctgctggtttcaccatccagccacgkccctggggccgggctgacccatgtttaccttcagccccaggttcagctccttgagcgaacggcrcatttcgttggtcagratgttcattctttcacattcttgaaaggcgactaccacrtagggggtcttttccgctgcctttgccrtgatctcagccatgttgaaagtctcyggaatcttctccaggatgtcgtccagcacggccttcacctggaagccagtccccggacagcccctgtcactgcaaagagcccaccccacccactgcagggtcagggagcctgcccaaaatgttcccagccccaagtcctggagaggagggaagaggcaagtrgagttgccagaaatgcagggtcatgggtgcagccacacatttgatgaggagagggagccttggccagcggctccgagcattctgatctcactacaagtccctgcagccgcggccatgagcgcatcaggccacctggctcggtgcctcatttgttcattcccacgcaccagcctctggtcaaatgtagccagcggttgagggattgcgactttgtcctttacgtgggctttctgtagggaccatgctggtcacaccctgttaaggagtggcccacacagtgcagtggtcacctgcaccaccgtctgtcagccaattcctgatttcagtcattagactaagagaaagtcctggacctaataggaataagggtctcacatcaagaattcagtctttaccgggaagtcctgtacttagctagtacgtaatagagcctttccacattctattaagaagtacaggccaggtacagtggctcacgcctgtaaccccagcactttaggaggccgaggcgggatggtcacctgagatcaggagttcaaaaccagcctggccaacatggtgaaactgtctctaccacaaatacaaaattagccaggtgtggtggcaggcgcctgtaatcccagcctgggaggctgagccaggagaatcgcttgaacctgggaggcggaggttgcagtgagccgagatcgtgccattgcactccagcctgggcaacgagagcaaaactccgtctcaaaaaaaaaaaaaaaaaaaagtrgaggtacccaggaggcagcacagagccacccagacaagcgagaatttgttcagaacactggcatcccctgaactcttctaatcctttgagcagtaacaggacctgccattgtggccactgagcggctctggagtacctgcctgcacatccggctgcccggtgcgagctgctactgctgttgtgctggccaggccagggtggggaatggtcggtgcccttcctggcgctcagctrgggaagctggaagactgcagggtggagggctgggatgctctyggagccgcatccacacccccaaggatccctttkgtctgggcccgtacgctcacccgaagcctgcagctgccacgtctgaggacctgctgaccagcctgcgggccataccccagtgtttctgatacccaagcccraggctggggcagagtgtacstcaccagcaagttcccctgtactgccgccagtccctgtgaccccctcctcagttctagatcctcccccttcctctcgcttgggagcagtttcaaagatcctgccttctcctcgmgggacactcccgtgcctgcccccgagtccgtctcttttggctgcatttccaggacagtgcggaacagcttctctgaggtgaccgtcagaaagccaatctctgcgttggggtgcaggccatacagatagggactctcagggggcaggttctcatcgatgtattcgtggtaaccctgaaaaagagggcagtttgtaarcagaggcaaagctgtgcaggctgaaacccatgtcctgttggttaagcattccttgccagaacgttcacccacaccttgctgtctgtacagatcccacttgtttcccagccccctttgtgggctgcccccygtgctcccagcgacataaaggaaaattccattcccccttccctgaggctgcatttctttctttaaaaaaaaaaaaaaaaaaaaaaaggttgtttgtattagccttgtgcttcttccaagtgagacgcatttctcatcctctcttattttggctgcctgggttcttgctcaattattgacactccatttgtgctggcaggctctcaccgggaggcacgagccttcattaygttgarctcctgtttaacttgtcatccttaccttgtagtccaggttgsgggggatctgaaagccgggggccagcaggacgtctccctccagcatctccgtccggatgtattcagccaggtaggtcctgcacagccgacggtcccagtcatctgtgatgtggccgccatacatgatttcaccaaaaaggtagcggagatcgtcccagggcacctgaggaaggatgacagcrggtaggggaaagtgcccctgtgccccttctctgccatgagagggtcaggctcaggcaggcagggcgtgggaacccagccwttggtgctgyrtccttctcgccctccaggtcagcctcctggccatttaccttcagggtcaccaggccccagggccacctttctttccatyccgcgccaccaracgccaatgtccggcccctttggcttctctcmcaaggggctgtgtggcacctccctccaccttggacagcgcttccacagccggcatgctctgcacctcccgtggggcaggtgtttctgctgtgcctcactgtgcctcagaggccacagggmtgaatcggaactcgctccctctgcctctcccactctgtgttaccatctgagactctgcccttcacggtccaatttcaacacaagtggtttgattctgtgtggctcaaggattgactccagtgccgtcaaccttttggccacgaagtcgttagtcatgtcttcagatgcatctggtgagtctcccttccaccctgtggaagtagagtccttcctggttctcatccttccagtagctcccgtgcctccagggtctttgcagtcacatagagggtttgagcaagtgacttatctgacctaggctgcccrggccttagggaacgaagaccaaactcggcagtgkggaccagagcacacgccaggcgaccacacgcttcccaccccgccgccgttcccactcccttcatgcttccttgcagtctcacgtcacacctttgctctggaayaytcttcttcctacaaagcctggctcatgggcggcctcrccatgaagccaggcccttgttcttcccgcctccatgtgcccgttttggagcctctttctcctgcacagcgcagttcagcagaaggacggtgggagccacggattgaggccacatgtgtcattttaaattttgtggcagccactttaaaagagatcattccaacatgtaattgggataaaaataagataattgattcttttttggtacccagcatgtgaaatcctgccgctcacagtcagcttcttccygcttccgcacacctgttctttccctgaagtttgcagctcctgaagggygaggcagatgttttcataacatcacttccactgtgcgctggccggaagagctgtcatcaaataccagtgggagttcattgaataagaatcagttgatgaatcaatcatctgattwggtctcatgaatttatatacatatgtatatattttttaggttgcttatttttgagatggagtctcgctctgttgcccaggctggagtgcaatggtgcagtctctgctcactgaaacttctgcctccygggttcaagcaattctcctgcctcagcctcctgagtagctgggattacaggtgcacaccaccatagccagctaatattttggatttttagtagagatgagatttcactgtgttggccaggctggtctcgaactcctgacctcaggggatctgcctgcctcagcctcccaaagtgctgggattactggtgtgagccactgtgcccagcccatatgtatatgttttttagacaggatcttgttccatgtcccaggctggagtgcagtggtacaaacatggctcactgcagccttgatctcctgggttcaagcgaccctcccacttcagcctcccaagtagctgggcctacagtcacaccaccatgccagactaatttttttattttttgtagagacagggtcttgctgtgttggccaggctggtcttgaactcctgggctcaagcagtcctcctgcctcggcctcccacagtgctgggattacaggcttgggccactgcactcggcttagtctcatgactttttactcaaaaygttaatgttttccacattatcattagcgacttacaaccttctctgtctggtcatcacaactgtttgcgggctgcttttcctgcatcttgcttagcagctttggaggcagcgtctgtgtctcccgagaggcaggaagacctgtgcccctctccccctcctggccccacacgctcctcaggagggttgcttcccgcagggggtgggggtgagtgctgtctgcatttcccgtacctgctgagggaaccccccaccccgagactcctgggggagctgtagctctcaggcccctccctgggagtccctgcaggttgctctgtgtttcaaagcaacgttccatcagacttttgtgttccgttcgcatgggaatccctgatctatttcctcagagcccagacggctaaacaggccgtggacacagatgacatcattcccggtggtcactcagmgtgtagcatgacctgtgccatgaagggaatatgggagccggtggggagtctgtggagggggagggaggcctgaggacagagggaaggttggccagcgcaggccacatcaggacacagctcctcaggatgtggcagccgctgatgtacatggtactcgcgcggcttctcagcagcttagaagctgcccagygtgtgtcartgggcaacrgctaaggaaatgtcttaaaaatcctaacctggccaggtgcggtggctcacgcctgtaatcctagcactttgggaggccgaggtgggcggatgacttgagcccaggagtttgagaccagcttaggcaacatggtaaaaccccgtctttacagaacaaaacaaaacaaaaacaaaaaaaacctggcattgtggccgctgtagtcccagctacttgagaggctggggtgggaggatcacctgagcccaggaggttaaggctgcagtgagctgtgattgtgccactgcactcctgccccagttaacagtgaggccctgtctcaaaaataaataaataaataaataaataaaataaataaaaattaaaaaaaaaattctagccagactgtttctcccaaactagtctctgcgtggtttggccgtctctccgtgctgaaagtccctttgaacatcttgggtgcctctgggagtgttttcagatccgggtcttgttctgggtgaaatgtccggccggcaccctgccccatcgaccggcagacagaggctgcctttcaccagtggcatctatggcccatggtggcccattgccagggagcacagggagccaagtcccggcccagttctgctccctgctactccagggctgatgtgcctcccagggaactaagcataccaagttccaggcccagccttcgccagcagcgatcctgggaggtcgttgtcctccagtcttggtgaggaggctctgtcacagcctcccaggccaggtgcttgacatcagaggtcacctcctgggggccttctcaggacacccaatgggagcacgtgtgccgtgcatgcctggggcttagtggcccaggtcttgagctttattacaaggagatggaaaaaaggagggggttcctgagactggcattgccaggccaggcttccctcattgaacccccaggccctgaggtggaggcccatgaggaagcaggcttagcggtccagtgacttgctggaggtctcagtgaatgagtagcagagcaggcttcaaacgtgsccccccccccccgaccccggtgccagcaccgtttctcaccaygtcacatccaggccctgggagtcctccaaccccgaggccccacgtaggcagcagccctcctgggcagctgagtgcagctttcttcccatccccctcccagtctgtaagaggktgcccggaccttgctctctctgagscagggtccatgtcgctattgatttggaggccgagagtgaggaggaggacccagggtttataggggtgtgcaccgccctctgccttctgggcgaggggctyctgggcctgtgccaggcttagcctgagtcaaagcttcgtaagaaccgtgcrtggtgagcactaccgctctctccagtttatggwtggggtggccaagccttaggagaccatagatggggctgcagggcctagcagggtacgtgctgcttacagagggccccctccagcgaatagcaggtctgggattcatacgctaccatctggtcccaaacctgtgccctctgctgtgcaccttgctctgtgccccgacctgtgcctcctgctgcagaccgtttacggaggaygtgyggctttctactcagtcctctgtggcagtctgcatgcgcctttatgcattctcataatggacacagcactcccttctatccggggaggttttttgtccctcctgctccaaacctgggttctctccagacactgacagagccgtggtraggcctgcagcccgggaagccctgcttgtcctccccactgagtcccagctcacaccctgtggtgscaggattctgggggaatcctcatccaggtgcaagaggggcaggtggcgtggagtgtgctaacaagcagaagagctgtccaaaagcyggctcctgcaggaggtgggggcaaaggactggaccatcttaattacagcaggctggagagatcacagatggtgctgcctttcaagttctctttggtttgtgaaacctacttgatgtcttttaagcctaagacaaagaccaaaaggaaagggagggaaggaaggagggagggaaggagggagggaaggagggagggaaggagggagggaaggagggaaagagggagggatatgtccaagtacagggcacacacagcccctcaccttggggttggcctccaggtagttgtagagcacgttgatggagatggtgaggtccccgttgttgaaggggtacgaccggttccagccctgggcgccgaacttgcgcctctctgccaccacagcgtggaagtagcacagggcgaagagcatgcacttgaactccatctccttggtgcacatctccagggtgtcctgtggggcacacgctccggtcaggtattagggagagggagaagtttacacagaaatgcccctgagggtgaccagcgtccagcccttgccagatgctttgctagggtgggggcggtggggggtacaaagctgtgggctgtgcaggtctctatcagacccgctgcaaggaaagctgggctgtcatggctgagtacgatcttcttgttcctttcagaaatgcaattttatcccttttaagtacttaactacaagttgaattattgatactgcttcctaatatcttcccaaatcctggacatttcgggactactttaatacgaaataatgttcctttgtaattatcaacattcctcatcacttatgcacagtatcccaaactctaaaaacaactggtaaagttccatcaggatgggggatgggatagaggatgggggatgggatagaggatgggggatgggatggggtcgcttctcaaaccctttctttttatctggctccagggaagggaaaactgagcctaaattgtgactcctacgtctctggatttgtgagcttttactcattaacctttgctacgtagtgactcctgaacacacagaggcttctggaagccaagctgtgctccacctgctctactcagcggctgacggagcacctctggggccaggcactctgtgtggggggagggcttcaggcacagtggccgaggatcccgctggggagggacagataagtgccaggggaagtgtactgggtggatcaagagcagggccctgtcctgggcatcatggaaagcctggcacaggcccctctggcaacatggacaagaaggcgagcagctggggttccatcactcgagtatcccctcctggctgcctgggacagagacgatgggcccaggagactggcctggccagtccttttcagacctcagctccctggggagggcgctggcagtgaacacgtggagagccagagtgacaccagccaatgggagactcaccagcccccaaggacaagggaaggcctggcgggtgtcaccgtccatccatcctccagagtccatccgatccggtgcttttcaccagcctacccgcactcaggtctggggcatcgtggacatacaggttccacccaccaccgcttcttcctgtgggcccttgttttcagaggcccacagcccctccgaggcaactggtccctgaacttgtgaagggtctccttacccacaggtctcagctgtcactccctggctacccacctccccaaccagagatgggatgaggtgccactcccgtgtgctggctggcagggctccacgctggctggaagtgaaggcccagtccctgcctcagtgccccgatccctgtctgtcgctgactgacactttgcaaaatacaataaaacgaaacaccaaaggaagaactgcccctgtgcttggattcacaagtgtcgggtcgctgcagagtttgttgagtgcctcctggatttctgcgctgatctcatacagactggcagaaaccgttccaggactggtgctgacctcagggctgctgtgagctgcatggccccatagcaccgtgtgtaccccacgcactcatcacactagggtgctgcttccagaacgtatcctcgcgcccctcagcagggtgcaggccaaggcaggaggcgtgtggtattgattgattggttaatagaacgggggacctattttaaacatttgtttttctgctttttcttttactttcacactttgacaagggtgtgtcctttaaaagctggttgggaattgttaatgggtgactctgatatttccatataagtagtttttaaaaatgtatcaggcatggaagccacacattcatggaccgatacaccccataagtagatctttgttaagtgttatagaatgatacagggtgttggccgggcgtggtggctcacgcctgtaatcccagctatttgggaggccgaggtgggtggatcacctgaggtgaggagtttaaggccagcgtggccaacatggtgaaaccccatctctactaaaaatacaaaaaactagccaggagtggtggtgggtgtctgtaatcccagctacttgggagcctgaggcagcagaatcacttgaacccaggaggcagaggtggcagtcagccgaggttgtgcccttgcactccagcctgggcaataagagcgaaactccatctccaaaaaaatagggtgtcaaacctcaaaaaagttctaggctccacttgggagatcaagtttgtgcacacaaaaagttctagacagagaaaatgctgaggtgccaaaaggagaaatatcgacatgaggacctgcagaggcaggagcacccccgaggacaagagtggccaagatttgggagcctgaggcaggtggatcacctgaggtcaggagtttgagaccagcctggccaacatagcgaaatctcatctctaccaaaaatccaaaatattagctgggtgtggtggtgcatgcctgtaatcccagctactcgggagtctgaggcacaagaattgcttgaactcgggaggcagaggttgcagtgagccgagattacaccattgcactccagcctgggtgacagagtgagactccatctccaaacaaacaaacaaacaaacaaacaaacacgtggccaggaaggctgtggagaaggctgcatctgggggaagccttgaggtctgtgagggaagagtcaggtgaggacagaccccaggcagatgcagaagtgggatcccagccaaggagggtcctcgagccccaggtgccaggcaggccctcaccctccgtcctggaggcamccagcagccactacagctgttagcagaggaggaccgggctccctagctagctgtgttttgccagctgttcctgctgatggtgggtcagaggggggctgaaggcaaggaaacctggtcacagatccagagcctcagcgagtacagcaaccccatctaccctggttgcccatagcctccagcagtggggctctgtactcccaggaaagctgaccagcctccagggagtaccccacggagcttggccccatttccaaggaccagtcatgacgtgttccatgctctttaaacacaatggacagcatctaccagccctcatttgcaggttcatagaactgattaaaaactatgtgtttctgcatctacagctttaagtaataaatagtgccagagcaccttaaattatttgcatttttccgtcttttagaaatacattgattttgactgcgaggggtgtgtggacaggggaagcccagaggggaggtgtccccagagttcagagcggtcctcagtggtcctcggggccccaagggatggatgccaggccgtggcrtgggatggggaggcagcccgagcaggcgtggccctacctgggtgaacaggtccagggccttgtgcaagttggcgtgcatgcccgtggggggctcgttggtgatcttgatggcgttctccagaatgccctgggggatgatgtgggtctcggggctgggggcaggctccgcgctgatgaacacccggtagtcctcatggctgcccgtgctgtagcrctccagcttcttgtccagtgttcccagccaccgggccaccaggtggatattctgcagccaagactagaggctggttacacactttgcccagctcctggcccacgaggagagactggcacgtggctatgttccctggtgagggcagggctcttctgccagcaccccacacttgcctggtgctggcactgccccacccctcacctgtccaccctaaccaggtgctgggcatgccaggatgtcttcggcgaagcaactgaggccccagaatctatttttgtgttcaatgaattgcaaacctccagccttacggtgagtcctttgtgtcctccctggcataaggctgagattctgtggtccccacccctcctcttgaagctgagggcttcccaccggggccaggcttagccctgtggattgaggtcgacacacactgtaagacccgtggaagctgggacaggcccagaggcgctcgaggacaagcggtagtgagaaggggtcttggatgggctccagggctgaggaggggtggtcgtgctaacgttgaaccaaatgtgcagagagcatctcctgggcgctctgggctttgaatgcccaccacaagagacgaaaaagagcagaacgaagaggacgaggaagacgacgacggacgacgaccacccccccctccctacaccgccttctttcacccactccacctcccccactgtagggtgcgcgtgcgccgcctagcctccacatacaccgcccgcgctcctctgcccacaccatctattaacaccagccagaactgtatactccgcctcttcctattccggccgaaaaacacgaaggagcctcactagctctcccactcccgcacgacctcccannnnnnnnnnnnnnnnnnnnnnnnnnnnnnnnnnnnnnnnnnnnnnnnnnnnnnnnnnnnnnnnnnnnnnnnnnnnnnnnnnnnnnnnnnnnnnnnnnnnnnnnnnnnnnnnnnnnnnnnnnnnnnnnnnnnnnnnnnnnnnnnnnnnnnnnnnnnnnnnnnnnnnnnnnnnnnnnnnnnnnnnnnnnnnnnnnnnnnnnnnnnnnnnnnnnnnnnnnnnnnnnnnnnnnnnnnnnnnnnnnnnnnnnnnnnnnnnnnnnnnnnnnnnnnnnnnnnnnnnnnnnnnnnnnnnnnnnnnnnnnnnnnnnnnnnnnnnnnnnnnnnnnnnnnnnnnnnnnnnnnnnnnnnnnnnnnnnnnnnnnnnnnnnnnnnnnnnnnnnnnnnnnnnnnnnnnnnnnnnnnnnnnnnnnnnnnnnnnnnnnnnnnnnnnnnnnnnnnnnnnnnnnnnnnnnnnnnnnnnnnnnnnnnnnnnnnnnnnnnnnnnnnnnnnnnnnnnnnnnnnnnnnnnnnnnnnnnnnnnnnnnnnnnnnnnnnnnnnnnnnnnnnnnnnnnnnnnnnnnnnnnnnnnnnnnnnnnnnnnnnnnnnnnnnnnnnnnnnnnnnnnnnnnnnnnnnnnnnnnnnnnnnnnnnnnnnnnnnnnnnnnnnnnnnnnnnnnnnnnnnnnnnnnnnnnnnnnnnnnnnnnnnnnnnnnnnnnnnnnnnnnnnnnnnnnnnnnnnnnnnnnnnnnnnnnnnnnnnnnnnnnnnnnnnnnnnnnnnnnnnnnnnnnnnnnnnnnnnnnnnnnnnnnnnnnnnnnnnnnnnnnnnnnnnnnnnnnnnnnnnnnnnnnnnnnnnnnnnnnnnngaggaggagatgcttttgtcaacccagcacttgtcatcttttttttttatttttttgagatggagtctcactctgtcgcccgggctggagtgcagtggtgcactcttggctcactgcaacctctgcctccccgggttcaagcgattttcctgcctcagcctcccaagtagttgaggttacaggcatgtgccagcacacttggctaatttttgtatttttagtagagacagggtttcgccatgttggtcaggctggtctcgaactcctgacctcaggtgatccgcctgccttggcctcccaaagtgctgggcctacaggtgtgagccaccgtgcccaaccatctgttgtttaaataatctctgtttggggtactctcgtataaagcccagcttccctctcaccgttgaagaatccacgctttcctctgggcagtcatggcgtgccacaccacccagctgaccccagcagagccgacactggggatgcctcctccttcagtggtgttaggatttccacccacatttctgaatgcaaactccacatcctgcttccttccgggccttctggcccatccccattggccacctcagtgcggggagcccttaccctgcagtgctggccccctcgtacctgcagaatgacccagtgtcctttctctgcagccacgtccagggmgttctcagccaccacctcttgtccctgccccagggacacattatggagttttccattgtctatggtaaaccctagtttttttcctaaagaaaagaaaaacaggaaaaaaacaccacgtaattaaatgacacaggttcaggctctgtgatctacagccaggaattccacatgcctccctcatttagtttcggtggtgaaatacacatgacataaaacttgctgttttaaaactcatcttaaagcgtacagtgcaccgacattcagtatattcacaatgctgtgcaatcatccgtttggttctagaacattgtcatggcccaagaggtggtccccatacccattaggcagtcgctcccaatctcctccaggagccactcgtctacagtctcctttgtgtctccatggatttatccattctggatatttcatatcaagggaactgcacaatatggggcctttgtgtctggcttctgtcactgagcatagtgtttttgaggtccatccacgttgtagcatgtatcagtacttcacttttttttttttttttttttttgagatggagtctcactctgtcgcccaggctggagtgcagtggtgccatctctgctcactgcaacctccacctcccgggttcaagtgattctcctgcctcagcctcctgagtagctgggactacaggcgcccgccaccacacctggctaatgtttgtatttttagtagagatggggtttcatcatgttggctaggctggtctcaaactcctgacctcaggcgatccacctgccttggcctcccaaagtgctgggattatgggtgtgagccactgtggctggcctcacttttttttgagacagggtctcaactctgtcacctagcctgaactccactccccaagctcaagtgatccttctgccttggcctccagagtagctgggaccacaggcatgcaccactatgcccagctaatttataaaattatctgtagagacaagctctccctgtgttgaccaggctgatcttgaactccagggctcaggtgctcctcctgtctcagactcccaaagttctgggactacagctgtgagccactgcacctggccgacttcatgccttttttttttttttttttttttttttgagacagggtcttactcggtcgcccaggctggagtgaagtggcttgatcacggctcactacagcttcaaccttttgggctcaagtgatcctcccacctcagcctcacaggtaactgggactacaggcgtacaccaccatacctggctacgttttcttgtatgttttgtagagacggggttttgccatgttgccaaggctggtcttgaactcctgtgatcaagcgatccgcccaccctggcctcccaaagtgctgggatacaggtgtgagctaccgcccccggcctgcttcactcttttttaatcgagggatactattccaccatatagagccaccatattctgtttatccacttatccatttgtcagttaatggacatttgggttgtttctgccttttggctattatgaatgaacgtctgtgtagagtacttgcttgaacacagatttaaatttccagttcttttgggtgtatactcaggcgtggaattgctggctcttgtgccaattctatatgtaacttactgagaaaccaccagactgttttccacagcagcggccccattttacatccgctcagcaacctacaagggtcgcagttctcaggcctcacaactcgtgttattttcctgttcttgatcattgccatcctaccggcgtgaagccgcgtcttgggtgtgaagtggtgtctcatgtgcttttggtgtgcattttcctggtgcctggtgatgctgacaatactccgtctttgagaacatcacttgcctgctacacttacccagggcttccacgtctttcaaggggtcaacccccggggagaggatgaagaagattgacgtggaggggctgctctcctcgtaggacttagaaaactcaacactccggccttccacgaacttgctgcccatcttttcctccacgaagttcctaggggtggagtgcatcagaggcagcggaacctgaggctctgggccagggcggggcgctcrgggtgggctgtggcccaggcaggggggccattttttggtggactttcttcagcgggacaaggcctgtggcaggagagcagagtctttacygggctttcctttctgcgagggattggccttgtttgcctcgggcaccctttctttcccgaggggccccgcactgtgctcctccttggagcagcctaagcaggtgcagggagaggccagccttggaaggcacccagggtcaactgcggggggtgggggcgctgagaaggaaggaagttcagattagagcaaagctttggtgagcctaaaaamgtcaaagaaaaaagcaacttcagatgatataaacacctctctctacaaaagcccccaactctttctaacatgaccccaataagtctggggtcagtcggggtctcggctaatcctcccatggaggaccgagtgatgttctggcrgtctttggatcaggtgttggcctttcttctgtgatcacagagggctgagcttactgtaatgtataaagaatgaatcacctgagctaagattagtaaacttgccagtgtggtggctcatgcctgtaatctcagcactttgggaggccaaggagggcagatcacttgaggttaggagtttgagaccagcctgaccaacatgacaaaaccctctctactaaaaatacaaaaagtagccaggtgtggtggcacaggcctgtaattccagccacttaggaggctgaggcaggagaatctctggaacccaggaggcagaggttgcagtgaggtgagatggcgccattgcactccagcctgggcaagagagcgagactccatctcagaaaaaaaaaaaattagtaagattttagtggccagctggtctctgaaaggaggacaaatggccgcatcccgaagggtgagaactgctcgtccctgggcaggtgaacgcccgagtgctctgagagtctgggtcgactttcagaaggctctgctcacactcatgccacccagcacacctcasctcctctggttcaaccagcaatcagccggctattgcctgtccatgcccttgggactttctggggacacctggatctgctattcctttccctgcactggcctttgctggcttgtctctggtgtcctgaactggggccagcctcaggcaagggtggggaggagttgctcctcctgaaggcccccaattctttttggaactctggaatggcctcagaccctagatgctgtgatccttgtctaggaaggaacttccagaacatatgaagtcctgcccctaggcaggaatgactctagatcacctttgctaattacttggccaggccaaatggtcatcggctgtggatgaattaatgatgcagaagcatgcaggctgggttsstcagacctcaccacctctgacatggtggctttgacaaaggagtgctggagccggctggtgacagctttcagcagaccccggcaactagtgcaaccggccacagaggaagcacttacgccatggaaattggcacatgctgtgcgtcagggtttgtgttgcgcacgtgggggtggcctggcctgccctcccagtgcctgtgacctgagtgtggaagtgctcccgcggctgtcagtgcttgcaacagtgcctgacacgagacacccttggccagtgctggctttgttattagtcacgtctgtttcaatctccttgcttttaagygaccccctccctatacaatcagggcagtaaatctgctttgctccacgtcatagaaatgtgaaacaygtcaatgctgagggatgatctgcgctcatgggtgtttgggatggtccaaggccaccgcagagcacgcaaatgcttccgcagtgggtggctgtttccttcttttaggtggccagagtgcagtcacacaggctaacttaggcgattctcagaagctctcaggagatggggaaggtcacctcacctcatcctctagacgaggaatcggatgcacactgggtcttgtgacccaaacatgctgcacactcccacaggagagggtgatcccgctgcgatggccgagggacctttaccttggcctttcccaaaccctgacccccgcttcctccagctctgaccctgggacacagctggcattctccctggacctcgctgctctcctgcatcacagtgacttctggcttcattccaccccctcctccccaccactcccggtccctgtcctctcctatcggaggaaaacaaggcaaaactaaactcagtcctgggagttaggcctctgctttgtcagaagggaattctttttatttttattttgaggcagggtctcgctctgtcacccaggctggagcgcagtggcacaatctcggcccactgcagcctccacctcccgggctcaaccaattctcccacctcagccttctgagtaactgggactataggagcccgccaccgcgccctgctaatttttagactttttgtagagatggggtctcactatgttgcccaggctggtctcaaactcctgggctcaagtgatcctccccaaagtactgggattacaggtgtsagccactgcacctggccatcagagggtaattctattagggacatgagtgtcctttgggaaacctggctgctttcaggytacttggagaaatgaaaaggggagaagccagacaggccacaggtgctctgaggacagaccccaggctcgtttctgtgctaaacgtcacctccttccttcaacagcccatccttccaacagggaagggtttcaggtctggagaaattgttggtgaaatcagaacagttctcttgcaaactagccatactaatatacctcgattgactttacgttttgccacagaggtactcaaagtcctcgaatgctgatgggtttgccattgttttctccctcaaaacatcytaaaaggaccccatttgtatggcctcagtgcttattcacgtccacacttgacatcttactttcaatgtaggaggctcatgtggggagtcttttcttcctatcatgtatcgcagggcacccctcctcagtcaggttagcgggggacaaggggttcccctaatgatactctgagacattaaggattaacaagaactcaggactggagtccgcagcctggggtggaatcctgcctctgtcctcgaagaactttgtgtgaaatgatttacccctctaagccctgtttcgtttctgtgtaaaatggggagaagaaaaaagttcaggggatcaactcaagtccacagagagtctagcacagccgctcggtcaagcttccatcaggcctgggcctcrggggcggggcccccggcgcrgcgggacactcacttgatagcgtaggtcatgcgatctggccgcaggcagcgcaccatgcacagcttctgcagggccgtcttgttcttccactccttggggaagatctccttctcgggggcttccgactccaccagctttttccagcgcttggcagatccttcgatgtcactgtccagatttttgaactcatccatctccgagagggcctaggggcagaggcagcgggccctgtgactcttcccacttacccgggtcccgagagccttcctgtacagttcattcaaggaggagaggccattaccctccgaggaaaccggggctctgggataaggaagcccgagaggctggccaccaaagcaggagctgtccatgcccagctcaggcatcccaggacagcgccgggagcctcctcggcagggtctaacctgcggacatgaggcctgggatgggctaggggctgcttctctaggggtctctgcaaatggggccattctagctcaggggacgaccttcttcaggtctttttgaacagaccttgagactcgagggtccctgactgtgtccaggaatctgaagaacaaacttttcacttgccacttcccttacgctgggaggaggggaggctggggggaggaggggaggctggggggaggaggagaggttgagggagggatggtaagaggccctgaggcctcttctggcccccagaggatatcactctctgcttgctgtgtgcaggtctcagggacctaacacatgtcacattccctataggaacgcagagctatctgtgagctggcagccagcccatcttggtctccatccctatgtgcggggcctccttgctttactgaatttatgggccacagagcctggtattctggccttggaaacatccgcagcatcagctggagggggctccacggcggggagaaagcacaacgtgttcaacgtctaaagacgaaccttgatcccgccccagccttgatgctggaggaagtccactggtgagaccactccggccttaaaagggaaccgcaggaggaaatccagctccactgggttcagctccttcttcatggacaggacctgggggaacatcgaggtgtacacacttaacgcagccagtaaaacgtcagcagccctgaagatgcgcgctggactcgaagaggagttcacactcccggcctgcagggggcgccctgtcctgcccctttggtttggggtaaagttttgtcttcacctcgtctcgctttttaagttgtgaaatacacataccataaaattgaccattttggccgggcacagtggctcacgcctgtaatcccagcactttgggaggccgaggagggggtggatcacttgagctcaggagttcgagaccagcctggccaacatggtgaaaccctgtttctactaaaaatacaaaaaaattagccgggcgtggtggtgcatgcctgtagtcctagctactcgggatgctgaggcaggagaatcacttgaacctgggaggcagaggttacagtaagccgagattacgccactgcgctctagcctgggcaacagagtgagactctgtctcaaaaaaaaaaaaaaaaaaaaaaaaattgacaattgtaaccatattttagtgtgcaattcagtggcatttcacatgattcgcagcatcgtgcaaccatcagcactctctagttccaggacttttttgttaccccctcgcccctgaagcagccactccccatcgccccttgcctctgagagctgctcatctgccttctgcctagggatgcccctgttgtggatgctttgtataaatggaagcacacgacatgccccgtttgcatctggcatctttcacttagcgtgatgcttctgaggttcatccatattgtagatgtgtcagaacctccttcctctgtaaggccgagtaatactccattcttgaatataaccacgctggcattctccattcacctgctgatggacagcgggtcgttttggctgttgtgaattgattagctttgctgattttttaaatttattttattatttattattatttatttttttgagacagagtctcactctgtcacccaggctggagcgcagtagcgcaatctcggctcactgcaacttccacctcctgggttcaagcaatcctcctgcctcagcctcccaagtagctggaattacaggtgtgtgccaccatgcccggctaatttttgcattttttgtagagacagggtttcaccgtgttggccaggctggtcttgaactactggcctcaagtgatctgcccaccttggcctcccaacgtaccaggattacaggtgagagccactgtrcccggccttgttgtctttgagagacagggtgttgctctgttgccccggctggagtgtagtgctgtgatcatggctcactgcagccttgaactcttgggctcaagtgacccgcctatctcagcctcccaagtaactgggactacaggtgtacatcacctcacctagctatttttttgtggagatggggtcttgctatattgactgggctagtctcaaaccgcctcaagtgatcctcttgctttgacctcccaaagtgttgggatactaggcatgagcctcagtgcccggcctcatctggcttttggctgctgcgattaatgctgttgtgaatgctgatgtacaggaatgtggacagatgctggacacctgtttacaggtcttgtgggtgtgtgcccagaagtggaagcctgggtcatattccatgccatcttgtcgcttgtgcatgccggccctctggacctcctgtgggcagggtctgggtcattttgaagtggtgtattgggcagctaacctggcaccctctgtctcagatgggcagcaggtggctgggagcaggggcaatggccactgccatctcctcagtcaagtgcccaaacggtctgtttttcagatcccatagagagtttcttcctgagctggactctttcttttggtcaaacaaaacgttctttgggaccaaagagaatgctttctaccctggaaaattagggggagcactgaggaactcttatcctgatgacctctcagccaggagaaaatctcatagtgaacctatgattcagagattcacatgtaaaaggaaccttcataatatggaccccattggttcaaagtttgagtttgaattgaaagccaggcttacactgatgcccaacctgtttatacaattagtgttgcccagcctgggcaatgtagcaagaccctgtttctttaaaaacattttaaaaaattagggccgggtgcggtggctcatgcctgtaatcccagcactttgggaggccgaggctagtggatcacctaagatcgggagttcgagaccagcctgaccaacatggagaaaccccgtctcaactaaaaatacaaaaattagccaggcatggtggtgcatgcctgtaatcccagctactcggaagactgaggtaggggaactgcttgaacccgggaggtggaggttgtggtgggctgagattgcaccattgcaccccagcccgggcaacaagaggaaaactccgtctaaaaaacaaacaaacaaaaaaaccagaacagaaaaaaaaaaaaattagctaggcacagcagtgtacacttgtattcccagctacagggaggttgaggcagaaggatcacttgagcccaggagttcaagaccggcctgggcaacagagcgagactttgtctctactaaaaaataaataaataaataaaaaattaaaaaactgaagaattagcctagcatggtggcacatgcctgtagtcccagctactgaggcggctgaagtgggaggattgcttgagtccaggaattcaaggctacagtgaactatgattgcaccactgcactctagcctgggtgacagagtgagwttgtctcaaaatagcagcagtagcaacaacaacaaaaactagtgtttccaaccatacttatggcacagtgtaaaggaaattgcagaggggctgtactatggtttgaatgtgttccccaaaaagcatatgttggaaactgaatcctcagtgcaacagtgttgggaggtggggtctgagaggcagttgggccgtgacagcagagygaatggcttaatgtcatgatcaagggagtgggtttgttacacaaggagtttggccygttttgtgctctctctygccctctagccttccaccatgggatgacacagcaagaaggcccttgccagatgccagcactttcatatggaacttcccagaccccaggaccatgagaaataaatttctattgtttatagattactcagccttgggtattctgttatagccgcacaaaacaaattaagacaggctgtttaatcaatttcagagaatgcagatctttaaatattttagcagggctgtataaacaggaggaatatttgtttattcatacacttatttcttaagaaacatcagtcaccccacagtgggctaagcactaatgcaggactatttactcagcacaacttacatgtaaaatgaatttccttgtgaaattctccttaaaacaccaccccttcactagctcccattggaatactgtgccagcttcccaaatatcaactaggagagccccaggcctgttccacgtcaggcatctcagactttataatcacctgggtatattgctaaaatgcgggtttgaaatcaccaggtttgggtgggggcccaacaatctgcctttccacaaagctcccaggggtcagtgacaccgctggtccacggaccacactaggaacagtgaggctagacattacctgaaaygtaacttgtgccaggaaaatgagtttgtccctctcgaagagtccccgggccgtgtacatgtagacggagwaggtgatctcgtccgtcaggttgatcacccgctgcttcacctcgttggcrggggtggtcctctggatggctttctcaaacaccacgttgaaggcctggggatccgccaccgagagccatggaggcgtgcagagatggagcccttcaccactccccgccacctgtggtggcctccagtttgttttgtttctttgagacagagtcttgctctgtcgcccaggctggagtgcagtggcgtgatcttggctcactgcaccctctgcagtgagggaggttgcagtgttcaagcgattctcctgcctcagcctcccaaggcgcacaccaccacacctggctaatttttttttatttttagtacagacagggtttcaccatgttggtcaggctggtcttgaactcctgacctcaggtgatccacccgcctcggccccccatagtgctgagatgacaggcatgagccaccatgccaggccatccagtttgttttgattgggttgtgagtgcctggaggcaccaggggaagagcagggaggagggagcagctcataccctctcctggggagaatgggtgtaggactgatgggggcccctggctccccctcttccagctccatctgcaggctggaccaggtctgccctctgagggtggccctggcactgcccgatggctgtgtgggcaacaggcctggctgtggagcccagatgcagccccaccttgagggaggcacccagccccagctkcagggcgcaccttgagggagaactggtagacggggttgattttgttgagatygttcagtatgaagtagagcagagatgccctctccgcagccgggcggtagttctctctygcttcgttgattttaacttctgtgatttttgcctccaccacctcgacacaaacaaaaggggtgtgaatgacacagcagatgggcagtgccatgagcaggtgggctcattcccagccaccagcctcgctccctgggaagccacccaagggctctcagcagcagctgggtgcaggatgggagcccagaccccttctcctgccctgggcccactcgggcacgtatgaccgaagctgcttttctcctttctcatggtggggaggcgccgatcgcccgtggcccagcctcccaagccctggctgccagggcacgtcaccgaggcagctctgaccttctcctcgatctcgctggctgtgtrcttggtggtctccagattctccaccaaggccgtgtctcccagaaagttccccgacgcagccgacagacgggccaggagcgartcttccagctctttcagaacaatcttaaattcgttttgagacttggtgaggtttgcctgcaaggggaggtgcaggagtcactgcattgcctggctctgtccaccgggcacccgggcctccctcaggtggccatgtagctgagccaaggcccaggctttgagcgggaggaacgagctcaggtcctggaaggggctgcagaagcagagcccctggaacctcagagaggccctggccctgctcccagccttgaggcttcctgtcacggagactgtagggggcagaacggggacaggcgggcctgggcctcctgagcccatgcaagtggctataacagccagaaatgtggcaggtgcaagggctggcagccaggccattcttgcagggcagcgctttggagcttagagcccccgaggaccgctgtgactcatgttctttaagcaaagaggtcatgtgacttagaattaaatttgggagcaggaagaggggacagctggggaaggaaatgagccatcctgtcgtatgagaagctgtgatgccgtgggacacactgaggcaccttcagagagaagcaacgacacacactggactggcagccctggtcggggaccctcacagtgacctggccccctctgtgtgggacggcacctcctcccgtgtgaccaaacttcaggccattaccttcagctgttccagatctgggcgctctttggccaccacagcggccaagagttggtcctcgagtccrtccctggtgaccaggaagttgatgagggtgcactgagcctgcatctctggcttgtagtgtgggttgaagtacttggtgtgtaggatcaggcggaacttggggtggtactccacctccttgtcaccgatcttaatgtacctggcggttggtggaggaaagggttagtgggcctcccagtgaccaggggagaggaacacaagtacagaccacctttcacyccagccccaggccaggccgccaccttgaaccctcccttctggtccctggaagagcactgcacctctccttgtctgttcctcctccctggcctgtgacgtgggcccttctgggagatgcacctgctctttccttgggtgatcaggctcatctttgcagcagggtttacacccctctggcgatactctgtcctcccctgggagccctgaccgaaaccttctgcttggcctccacccagactcatttacaacattcgtccattctggaagctcccaggactgcaaccctgggtctgctcatccactgtggggggcgcttctctccggctctacaccctgctgtcccctctttgtagctgggctcactttgaggggcctctggctagcttcacccctcagcactcacaccaggcccctcccagagtctaggacctctgcatattgatttgccacctcctgggttctgggtttctgcatgcatctctgcatttaaaggtggctcctgtcagctctgacatttacatttttaaagtagatttaattttttaaaattgtaaaatgaataatgcaagctccacgcatcagctgatgagtggacaaacacaatgcgcccggccacacgtggaaaatgattctgccatcaagaggaatgaaggactgacacatgcgaccacgtgcatgaccccaaaaaacatgctaagtaaaggccgggcgcggtggctcccgcctgtaatcccagcacttggggaggccgaggcaggtggatcacctgaggtcaggagttcgagatcatcctggccaacatggggaaaccccgtctctactaaaaatacaaaaattagctgggcacgttggtgtgttcctgtaatcccagctacttgggaggctgaggcaggagaatcacttgaacccaggaggcagaggctgcagtgagcagagatcgtaccactggactccagcctggacgacagagcgagactccatctcaaaaaacaaacaaaaaatgctgagtaaaaagagccagacacaaaaagacacatgttgcttgattctcttcagaggaaatgtccagaataggcaaatccacagacacagagagcagagtagtggatgttagggctcaggagggaggggaatgaagaagagtgggtacagggcttcctttcggggtggtgaaaatgtgcaactggacagatgtgtttgtacaacatcgtgagtgtaccaaatgctcttcaattgtgtattttaatgtggttaattttacgttatgtgaatttttaaaggtaatgcagtcccaagatttgcaaaatgcctaagaacagaatgaagacagacatcaccttcaagcctccccatctggaggccatcactgataaaatgttggcggagatattcctaattgggaagtggcccctctttccagtctttcctcaggagctgggggttccttcccaccagcaggcactttgtcaaagcccttgctgcttaccagggaagcaaaggaaattccgggcgttttctctacatgcacacgcccaggcctcgggcctgaagatgtttacctggctcaagccacggaggcggaaacaactcactttccctttttaatcgtgttcctgcccagtagagggtccagcacggggtccacrgtttcgccgatgttctcaatgagcaasgtgtycccttccgagatggcctgctcgatgacatccaggtagctgcgggcacaacacggaagctggttcatggcagagggcctcgtgatggaacggtgcgcacgctccgaccagcagcccctgccctctgagcgagacagcgccaagcgaggggtgacctaggagcccacaacttgttcccaacagctcgccctttcctgaaaggagccgaggggcttctttgtaaactgcccccgtgctcttatgggagtggagatgaaaatggaaacagttttgctttttgagacagggtctcattctctggcccaggctggagtgcagtggcatgagcagggttcactgcaaccttgacctcccaggctcaagtgatcctcccatcgcagcctcctgagtagctgggactacaggctcatgccaccacacccaactaggttttttttgtttgtttgttttttgttttttgttggagagacaaggtctcactatgttgcacaggctgggctcaaactcctgagctcaagcgatcctccttcctcagcctcccagagtgctgagattacaggtacgagccaccacacccgggctggaagcagctttgagtagctttatggccacagagacaaatgttttcatatccacccgccattggattttccagcaccgctaggaagcagggcatcactgtacctgtgtcgttatagccattgtttctcaactgtgatgagaatacagaccacgagacccaggaacatgaccagcctcaaacctcccagccagcaaatggccaagcgggaggcaaccccaggcctgagcctccgtctcactctcctttccctgcaggagcagcaggtgatggggacaggggaagggaaaagagctcctcatttcattctttactactgctgctgttccccaggccagatttaaaacctgtgggctagtacttgtattgaaagacccacccatccattgaaccaatatggaatgcctaaggcgtgcttccaagcagagccgggcttcggcccaggtcctgcgcccgcacacacctcttctgtcccaggcggatggctttcagttcactcctgtatttgtttttgatccacttgattccttggagctgggcgtccacgatcagcggccaccgctcggtgttgcccaggatggtggcattctcggtggacatgcggtcgctggggaggccctggttgttccaggtggccacgtccgcgtcatctgtcagcaggctcaagggatccaggccattcgtgatcgggatggggacctgcccagggaggcacactttcttagagggggtaatgcgaccttattacttactagaaaatagctctccaaataatgctctgtctggtgctgcggttaggggtggaccagcaggacgacctgggagaagccagccatttccatcactctggacagagcagctttgtaactcggccagaaacgatgtcagcacagcaacaccgggccacgttttttttttcc

SEQ ID NO: 93458 - DNA, 30116 bp, Homo sapiens
  misc_feature (1)...(30116): n = A,T,C or G
caaagggcttgatgagggggctgggcttccagtcgtccataccggattggcgggtcaccaatgtcctggccagcccatgacttcaggaatctgaagggaccagagggccacatggggtaagatgctcctcccaaagtctgatgccttctggggagatgagggaggacctcccagcaactcttccctgcaagcacccatactgtgtgacatggggaaagtggctcaacttctctgggctggcaggaaacccttcagtggggttggatcacctggaaattccctgagactggagtaactctctgaatcaaggctgtccaagggtggaggccaaataatcggctcaaagttcgttagcccctacaaggaccaagttccaggccttcccaagcctgtggtgagcaaagagcgacctctcctgccccagtcttcaaccctcgtcccatcctatctgccccagcttctctcctcctcccagggcccggagccgcccgagggctcaggagacctgcaccggcagcgctacccgttccggacacccacgcggaggcactcacggcttaggggccccgggccccgctcgggccccgctagggccctcactgctcggcccggctcgccgcggcctccgcctcctccatgccgcttgcggccccgccccggcctggcccgcccccccgcttccgccgccgnnnnnnnnnnnnnnnnnnnnagtagactataactaatacataataacacctatttctgttttcttccacacgagcaaactatgtatcctagcactccttactgatcactggtgggatggataacaacagactcctcttcatataccgccctcatatgcaagagccgtcacataaacatctgcgcgacagcttcttcttctgtaacgccacggacgacacgcacacactggagatagccgacgataagtcaccccggcttgcatctttagtttccggaacaccaccgcgcggaggcttttcctctcacttttctcagcggccaccgcccccaccagcatgtccaatacgaggccgctccctaacttcctaggaaccgcgaatttaaaccaggcggttatctgccattttccacatcacaaattgtccgaattttttgaaagtagtcactaagaaaacacagagtatattggggtaaaaagacccccactctcgtttcgcccgccgccggctgccgcggggtgagagggcgacgggcggtgcttagggcggcggcggcggcggcggcggtggcggcagcggcgtcggggtgtaagcagccagcgagtaaggcgaatgctcagaccgtgctaggcagttcgcagcccggctggctggtggggctgcctgcacgagagcagcccgctccccagcaccgccgatggcaagcccgactccagtcagaggcctagcaccttggaccagatcacagggcacgccagggtcagaggggctgcaacccttggacacagggcacacaccacccgccccatacccgtcctgggcaaggccgttacctagtcctggggcatgcacagctattggaggccaagggagattaaaatccaggttctgtcactgttctaagcaccttactgatgatgtttaattccacaacaaccccatgaggtaggcgctattatcattattattgttttttttttaattgagacggagtctcgctctgtcgcccaggctggagtgcagtggcaccatctcggctcgctgcaacctccgccttctgggttcaagcgattctcctgcctcagcctcctgagtagctgggactacggtcgtgcgccaccacacccagctaatttttatatttttagtagagacggggtttcaccatgttggccaggctggtcttgaacttctgacctcaagtgatccgcccgccttggcctcccaaagtgctgggattatgggcagtgagccaccgtgctggctataggcgctattactatccctgtcgcagataaagaaataagacctaatatcacaaagctaggagaggtggaattgaaactcagcctagctccagattctgctcttaaccactgcactctgctggcaacaatacataagaattgccaggtttaaataacatcatacatagaaagcagttagcttaacacaatggttctcaaactttagcttgcgtcagaatcacctggatgacttcttaaaacagaggtgctgggccccatccctagagttttagattcagtggtctggggcagggtgggattttgcattcctgagaagtttctaggtgatgttgatgcttgtttgaagtggatagccatagaacagttttaggcaggggagcaatataatccaatttctgttttaagagaacctttactttttttgtggagaatgggttggaagcagacagaggaagccagaagaccagttagatttttttgagctttctgtattccatctgcttcctgaatggtggggtaatatcccccaaaatgaaatgttaacagtacttgtcttaggagttaaagaaatacatgatttttcctagtaagtatgtataagaatggaagaaaacccaacacattttattacatttgaaaagatgtcccggctgggcaccatgactcacgtaatcccagcaggttgggaggccgaggtggggtggtcagttgaggtcaggagtttgagaccagcctgcccaacgcggtgaaaccccgtctctactaaaaatacaaaagttagctgggcgtggtgacaggcgcctataatcgtagctactcaggaggctgaagcaggagaatcgcttgaacctgggagacagaagttgcagttgagattgcaccactgcactccagcctgagtgacagagcaagactccgtctcaaaaaataaaaaaataaaaataaataattaaaagatgtccctcagggttccttcctgaccctcttttctcctcaaactgactcttcatggatgatctcattctctcatgacctctgttaccaatctagatgcccaaactgacattggcagttctaacctctttcctgagctccaggctgcctgatgtccagcaggacatcttcacaggcccctctaacgcaacagcacaacttctggaatcatttcctttcactcctagatttcctgtgggttcccctcctcagtgaactgcaccaggccaaacagctgggagtcacccttgactccttgtctgtctccagtgaccagtccaggtatgtcttgctcaccattgtattctctacaccacacacaaaggctggcacatagtaagctctccgtaacatttgttgaaatcattcatttgtattttttaacaaatttttattgaatgccactataaatgaatgtaaccagtcacctagtcctgtcagtcttacctcctaaagagccttccattctagtctaattcttctttgacctcacaatcagccccagtgcaggccatttcagtttcttgctttccagccagtctccttgactctagatttttactcctcctatccttttctccttgcaaaatccagagtgattttctttaaggcaaatgttgccgggttcggtggctcatgcctgtaatcccggcactttgggaggccaaggcgggtggatcacctgaggcggatggatccgcctggccaacatggtgaaaccccgtctctactaaaaatacaagaattagctgggtgttgtggcaggtgcctgtaattccagttactcaggaggctgaggcaggagaatggcttgaacctgggaggcagaagttgcaatgagccaagatggtgccactgcactccagcctgggcaacagagccggactctgtctcaaaaaaaaaagacaaatgttttgtctatctctaacttaaaacccttccatggatcaaaaagtaccaaggaaaatgatgttacttaaaattataaaggtaggccaggcatggtggctcatgcctgtaatcccagcactttgggaggctaaggtgggaggattgcttgaggccaggagttcgagaccagcctgggcaacatagcgagactctatctaaattttaaaaaaagttaattacaaaggtaaccttagatgaactaaaaagagtgatagaaatatgtagtgccaggccgggcgcagtggctcacacctgtaatcccagcactttgggaggctgaggcaggcagatcacgaggtcaagagttcgagaccagcctgaccaacatggtgaaacccccgtctctactaaaaatacaaaaattagtcgggcatggtggcacgtgcctgtaatcccagctactcaggaggctgaggcaggagaatcgcttgaacccaggagggcaggttgcagtgagtcaagatcgtgccactgcactccagcctgggcgacagagtgagactccatctcaaaaaaaaaaaaaaaaagaaaaaagaaagaaaagaaaagaaatatatattgccaatgggggaaaggaactacagagtgtgagttaaacccatatatccatatttatctgaataggacaataaacagcagatgaatgtttaaaattgagaagtagtgtggctgggcatggtggcatactcctgtagtcacagctgcttgggaggcaggaggattgcttgagcccaggagtttgagtccagcctgggcaatgtaagaagaccctgtctctaaaaaagaaaaaatagtggtaggatttacannnnnnnnnnnnnnnnnnnnnnnnnnnnnnnnnnnnnnnnnnnnnnnnnnnnnnnnnnnnnnnnnnnnnnnnnnnnnnnnnnnnnnnntggctactttcacgtgagtgggcctagaggtgtgaaagggtagggtaggggtaactatcttctcattgtaaatccttctgcaaccatgggctggaattacttgaattaaaagcctaaacaaaccagagttttcatggctgttcattacctgttaaataaaacccaaacatctcagaaccattttctgtaaccttgttactcaaagtgtggtcccttattacttgaagtgtggaccagcagcatggccatcacctgggagcttattagaaatgcaggatcttggctgggcgcagtggctcacacctgtaatcccagcactttgggaggccaaggcaggcggatcacttgaagtcaggagttcaagaccagcctggccaacatggtgaaaccctgtctctactaaaaatacaaaaatattagctgggcatggtggcgcatgcctgtaatcccagctactcaggaggcagaggcaggagaattgcttgaacccagggaggcagaggtttgtagtgagccaagatcgcgccaccacgctacatcctgggcgacagagcgagactctgtctcaaaaaaaaaaaaaaaaaaaaaaaaaaaatgcaggatctcaagccccaccccagatttacaaaatcagaacctacattttaacaagatccgcagataattcatacgcacagtcaagcttaaggagcatcttgcttgtaagcccaacgtggacctcttcagcttcagtactggttgcccttttctactccgttagcctgaattctagcccctggggggggggggtggtgtgtgtgtgtgtgtgtgtgtgtgtgtgtgtgtgtgtctagctaaaatccagtcatcgttttatacccaattcctctgctccaggaagacttccaagccctctgcagctctctgttaccgctgttccttaaactcccacatctctgactgaagctgcttagacttcattctgcaaacatgtattgggcgcctgctgtgtgcctggctggattcagtgccagggtggggcgaaggcgctgaggtctccgagtgctctttcaggtccaactccagaatcgcccagccccacgcaatccagggccagaggttgtgtgcgcagcactcgaatacatccacagacggtgctgcgcggcttttctgagtgttacggcgccctcctcccgcccccgcgccgcgcgggcggggacccaccggttttgctccgctttagcagcggcgaagggaggacccccgggagccggtccccggcgtccggtcgcccagcccttttcaggcttgggcccgcatggaggggaccgtggagtcccagacgcctgacctgcgggatgtggagggtaaggtgggcaggaagacccctgaagggctgctccgcgggctgcgaggcgagtgtgagctgggaacctctggcgccctgctgctcccaggggcgtctagcaccggccacgacttgggggacaagatcmtggcgctgaagatggagctggtgagtgctgaatccatgggccaaggggacgagtccctagtgtagggccgggagggacgaactcatgctcccagagttaagctggagaggaggtagttaaaactctccacctaactgctcagaatccctcccagatcaatccgtaaacgctggggtggagatggagtgacgtccattacttgtcccccaagagtgagtggggtgttgatggtcctgaggacttgggttgggagcagtgggttttggaagttattcctgccaaataattgggaggagagagatgaggactgggaagtactgagaacccaacgcagcacaaattccccccgcctgtatgggccacctattccccgccagtccccgttgtaaggcaaccggttttttctccttctgctaaccgggaaagggtttaagttcctgtgaggccgcagtgttccgcacagaaaagaagtgggtaaaggggcctatctgctgaaaactacctggaccaggggcactgaaaaccttctccgtttcctctacatcccccagccctacttaaaataatggaaagttcctagacccatagcagggacagagagtagcagcaccactggtgctgattccctcgcctcagactcagtctcctcccagccagtcttccaggtaaactggatatttggatctcatctgtacattcttggggagaagaggaaacagcaaccctcccctttctctattgctgctggtctagattcagagccaaaagggcagccgaggccctggcaggttccccagggccctgattccggtgaagtgggtgatttacacctgccactactttgcagccagttctggggaactgaggaattgccatcggcttcctggctcacaaccaggagcccacagtgagtacgtcagctaaagtcttcctgtgtgcccagcctgtgccaagctggtctgtgaaggagaaggggaaggaartcatgggggctctgagaccagccagggctccgacgcctgagctgagaggctgggaagagagtctggtgggtggagcagtcaggaaaggccccctgggagaaggacttgaatgccaagtgtgcacttggccttgaaggttggaggtgagtgcccaattctccagagcaaggctgtgactgtacccacctaagcgggggcttgcctttgcctcactgtacaaactttagctcaaggcctagtaagagcctatctagactgtctacttgctttgaaaactttcacccagtgcatgtgccaggcagcttgctgagcactttacatgatgctctcttcatctccacagtaaccctgttaagtgatattttatagatggagaaactgaggcacagggtgggcatggtggctcacgcctgtaatcccagcactttgggaggccgaggcaggcagatcgcttgagcccaggagtttgagaccagcctgggcaacaaagcaagaccctgtctctacaaaaaatacaaaaattagatgggtgttgtggtgtgtgcctgtagtcctagctactctggaggcagaggcaggaggatcacttgagcccaggaagaggaggttgcagtgagctgaaatcgcaccactgcactccagcctgggtgacagagctcagagctagaccctgtctcaaaaaaagaaggggaagaaggggaggaagggaggaagggagggagggaggagaaaagaaaagaaaacagaggcacagggagtttaataactgcccaacatcacgcaaaaagcagggccatgatttgaacccagatcatctgactgcactttgcatctttactttgagacctgctttgtgccagatagtctgaacattttatgtcattgaaatgagaaaactggtcatcatttctcccatcttacagataaaacgtgcttgcagattctgaactcacatagggagtcagtggaagagccacgcccagtctctggctctcttctctgccttggtggaaactatctgtaaactttaaggggctgcatttaacttttgattttgtctctctgtattcttgacccagcttgcctggggcctgaggctgcccgagaaagggcacaagggagggagccttctggggccagaatgaggagagatccccatcctattttttctccttcctcaggccaggatgttattaatattaatctcttcttgtgctctgccctgcctactgggttgcacccaggaaggacaaggggtggggcaagggatttgccttcgggctactgaaggcaggactggttcaagccctctaaggactgtccttcaattgttcctctcccagctctccttgcacaaagggggaaggcctacccttgaggccaaggtcagtcctgcctctaggcctcgtccctcctgctttcttcctctaccctccattcaaaggttgagtgaacaagccagactgggatatgtgggaatgggaaacagtggcaacttcttcttagttctcccacccaaagaactgttgctatgacaacccacctccacagaggcagtttgagaaaaagctttaggcaaggaagaatgcacgggttcaagtcttggctctgcttctgaaacgttttgtggtcttgagcagcactctgtctctctcctggcctcagtttttcctccttttggtggagggggtagagggagatggggactgtgaaaccagatgattgttaagaacctttatagtaacaatattctgatagtccccgctctgggagctcggactgggatttccaggcttttaccctagggcctgatttatattgagcaatgaggaaaccatacaggaccccagcgctgggcagagagtctggtatgtagatgttaaggagaggagtagggagcctgaatctccttggaaggagaattgggtttggagtcgcctctgaggctgcatctctcctgagctgtttatcctatactctattttcttcaagagatggtgtgaaaagagtgtttctttttctggcaagaaaaccttgctttcttctattctgggagtgatgctgtcacagtcagggaatcccactgccacaggattatagaatctgctctcagatttatttcccagcaacacactacaacccagacccctgaatcctgggaaccatcaaaggggtcaaggatagtaaaggcaagagaatcacagaactgaatgtgacctccttagcactgggccaagcaccagaaatggattgggcaggatctgctctcagggagctcacagtctggttagggaaggaggagacagaagaacatttctagtacaggatgataagtgctggtagaacccaggaagggcctcctggaagagtcttcactgtagagtgatgtggttgggtttgtgctctagaaagtcgatttcaaattggaaggaggcacaggctgtttcctctgcttgaaatgcttctctccacctctttgtctggctgagtccttctatttttttttttttgacacagggtttcactcccatcacccaggctggagtgcaatggtacaatgtcggttcactgcaacctctgccttccaagctcaagcggttctcctgcctcagcttcctgagtagctgggactatgggcatgtgccaccacacctagctagcttttgtatttttagtagagacgggattttgccatgttggccaggctggtttcgaagtcctgacctcaagtgatcttctgcctcagcctcccaaagtgctgggattacaggtgtgagccactgcgcccatcctagctgagtccttcttaaccttaaattttcagctcatgtcccttatcctaggaagcatttcctgacctggttaggttatggccctctaggtatctacagtcctctgtatagcagttgtttccactagcgtttgccacactgaacttttctttctttctttctttcttttttttttttgagatggagtctcgctctgtcgcccaggctggagtgcagtggtgcgatctcggctcactgcaagctccgcctcctgggttcagcccattctcctgcctcagcctcccgagtagctgggactacaggcacctgcaaacacacccagctaattttttgtatttttagtagagacggggtttcaccatgttagccaggatggtctcgatctcctgacctcgtgatctgcctgcctcggcctcccaaagtgctgggattacaggcatgagccactgcacctggcctgaacttttcatttttaaattatttatttattatcattattttttttgacacggagtttcgttcttggcgtccaggctggagtgcaatggcgtgatctcggctcactgcaacctctgcctcccgggttcaagcgattctcctgcctcagcttcctgagtagctgggattacaggcacccgcctagttaatttttgtatttttagtagagatggggtttcaccacgttggccaggctggtcttgaactcctggcctcaagtgatctgcctgctttggcctcccaaagtgctgggattacaggtgtgagccaccccaccagccttatttatttttttaatagagacagggtcttgctatgttgcccaggccagtctcaaactcctggcctcaagcagtccgtttgtgtcagcctcccgaagttctgggattgcaggctgagccacaatgccaagccaaccacactgaattttaagtgcttgcttcattgtcttatcttacccactagattatgaaccttctgaaggtaagaaatgatgccttttctttcttcatcgaacatagtgccacaccaataagaaacaataaatattggttccataactgaatggattaattccatctcgaggaagggcaaggaagacttcctcgaggaggtgacatttgagctggggcttgaagaatgaataaagtcagtgggaattccagttcaagataccagattgagggccggcacggtggctyatgcctgtaatcccagcattttgggaggccgaggcgggcggatcacctgaggtcaggagttcgagaccagcctgaccaacatggtgaaaccccatctctactaaaaatacaaaaattagctggacgtggtggtgcacctgtaatcccagctactagggaagctgaggcaggaaaatcgcttgaaccctggaggcggaggttgcaatgagccaagatcgtgccactgcactccagcctggacgactgtgcaaaactctgtctcaaaaagagaaaaataaataaataaaataaataaaaggcatgaagccgttatgacaatgagaataagagacaaggtaataggaacaaaattttggaaactgaaattcagaaggaagagtggtaactaactcagacctaaaaaatgctcagtcccgagccagcagtggggaaagctgaaaagcaacacttttttattttgtgggggatagagttttgctcttgttgcccaggctggagtgcaatggcgcaatcttggctcaccgcaacctccgcctcctggattcaagcaattctcctgcctcagcttcccaagtagctgggattacaggcatgtgacaccatgcccagctaattttgtatttttcgtagagatggggttgctccatgttggtcaggctggtctcgaactcccgaactcaggtgatccatccgccttggcctcccaaagtgctgggattacagagccaccgccccctgccaaagcaacacattttatactgcaaaaacccttaaaggtcttaggggttggaagcaccaggtatttctggaactgggggcacaagtggggctgaaaacaaaagggctggttgaatgtttaaaagtcatattctaagatcccctccctaactgtgcaaccaggtgccacctaattctttatctagcagaagactggagatgtaagttctgttgttgttttctttttttttttctttttttttttttgagatggagtctcgctctgttgcccaggctagagtgcagtggcccaatctcagctcactgcagcctcagcctcccgagtagctgggattacatgcacccgccaccacacagctaatttttgtatttttagtagagacggggttttgccatgttggccaggctggtcttgaactcctgacctcgggtaatccacttgcctcagcctcccaaagtgctgggattacaagcatgagccaccatgcacggctgtagatgtaaattttggaaagaggaaggaagggagggatggagggaggcagaaaggaaggaaaggagggaggggaaaacagcaggacaagtgtttttagtatgaggagctttgtttaatgtatttagtttggtcatggactaggacagttgtcttcactgttcatatatttgtctccaggatgaaataattgaagataatctcctttatcaagttaatagtctgtacagtctgatattgcagttatttatgttcatctccccttattgagactgcaagcttctattaagcaggaacaatttctccattatctttgtaattattagcaaatccatgtacccaatagtcatttgttcaattgaattagagttgtgatattcttccaaaaacacaaataatttcaggtataaaatttttttctatgcttttgccatagtgtttagaaaaccctaaactgtgtgtgtgtgtttttttaattttttcacttaatgcaacacaacaataatcattaatacagaagaccccaaaatatatgaggatttcttcccaccagcaagcaagcaatcagttctgcagcagataccagctgggtgtctactaatttaatttcaactctgtctacctggagacagtgtcacatcccacaggttgagggctcagtccccaagactgtccccctcttcagacactagtcgtaaatctgggcctcctgaccttctgaccaaccagcttcaaattggggttcctatgaccccctccttgggtttgattggtttgctggtgtggctcacagaactcagggaaacacatttactggtttattataaggatattacaaaggatatagatgaagagatgcatggggcaaggcatacgggaaggggtgcggaacttctgtgctctccctgggtgcaccaccctccatctgttcagctacttggacgctctctgaatcctgttgtggggacctttttttattttttgagacaaggtctggttctgttgcccaggttggagtacagtggctcaatcacagctcactgcagcctgtacttctctggctcaatcaatcctcccagttcagcctcctaagtagctggcactacaggtgtgcaataccacactcacctaattttttttttttttttttggtagagacagggtttccctgtgttgcccaggctggtcttgaactcctgggatcaagcgatcctcccacctcagtcccctagagtgttgggattacaggcttaagccactgtgcctggtcctttgggccttttaaagagactttattggttgtccacgattgaaacatggacaaccatatcaaaatgttattggacaaaaagggtctgatcaaaacccagcaaagcctgtctgtttagattcttattggcctctctctgcggcattccttcctccagggtatgagtcaggaccttctctggaatgagggtcttatgacccacaatcagattagagttctactctgggaaggtgagaggagagcaggagaaggtcagaaagagactgtttcctgaagcctatttctgagtgccccagcattataacaaacactgtaacaatggctatggggcttatgagccaaaaactggatgaaaacctgcacacaycacacacacacacacacacmcacacacacacacacacacagtaatatcacaactagtaaataagtcgaccatagtaatatgtagagccaaatagcctaccatttattgatttacagtattatacttgtcagatggtatgctatgcatgttaatatgttccttcgatgtctcatgacaaacctttagatagtacctcatattataataaagaaatgaaggtttaaagaaatcaattttaatttcatatggctcattaatggcaaaactggaactcaaatctaggtccatttaattccagtgtctaattttctcaatgtacaaatatatatatatatttttttgagacggagtcttgctctgttgcccaagctggagtgcagtggtgtgatctcggctcactacaacctctgcctcggttcaagtgattctcctgcctcagcctcctgagtagctgggcttacaggcgtgcgccacaacgcctggccaatttttgtatttttattagagacggggtttcaccatgttggccaggctggtctcaaattcctgatctcaggtgatcttcccacctcgacctcccaaagtgccgggattacaggagtgagctaccacacctggcctcaatgtacaaatattaatgcatggtcttactctggtttatcatagatgtgaataaagcagttatttcctgaataattcaataaacatttttcaaatacaaaaaacatttactgtgtttgtgtgacctgcgggatctgacctgtatatgtaaatacacatacacacataatgacgttttggtcartgtcagaccatgtataacataaacaaccatgtaaatttttttttttttttttgagacggagtcttgctatgtcatccaggctggagtgcagtggcgcgatctcagctcactgcaagctccgcctcccgggttcatgccattctcctgcctcagcctccccagcagctgggactacaggcgtacactgccacgcccagcgaatttttttgtatttttaacagagacggggtttcaccgtgttagccaggatggtcttgatctcctgacctcgtgatccgcccgccttggcctcccaaagtgctgggattacaggcgtgagccactgcacccggccaaatttttttttttgaatcagagtctcgctctgtcacccaagctatagtacagtggcaccatctcagctcactgtaacctctgcctcccgggttcaagtgattctcctgcctgagcctcccgagtagctgggattacaggcaagagccaccatgcttggctaattttttattttattttattttattttatttttttgagacagagtctcgctctgtcgcccaggctggagtgcagtggcatgatcccagctcactgcaagctccacctcccgagttcacaccattctcttgcctcagcctcctgagtagctgggactacaggtgtccaccaccacacctggcaaaaattttttttgtaatttttagtagagacggggtttcaccgtgttagccaggatggtctcgatctcctgacctctagtgatctgtcctcctcagcttcccaaagtgctgggattaccatataaacattttgatcaatgatagactacatatgtcaaataaacatttatcatgtgtgtatatatgcacatatatataaacatttatgtgtatataagtgtgtacacatacacaaatatttatatgatgtttcagtcatcatacgaccaaaacatacgatgtttcgatgaacagcatataccatagtgatttcataagattataacacagcatatacacaaatatgatatatggcacttgatattggcatagcagatcaagtagggattgatattcagtaattgtgctgggacattttgttttccatattttaaaaagtatataaattttttaaaatgtcatctagtttgtgcatttaccctgtcatatttgcacggcagtaaaacctcctgctggtgtatttctctaagcatatccccattgttacgtgacaaatgactttatatatggagaatagaacagaaggtctctagattaaaagacactgagcatagttgaggacaagagggactaaataaaaatacactaaatacggccaggcacaatggcttacgcctgtaatcacagcactctgggaggctgaggtgaggagtttgagcctgggagtttgaggctacagtgagctatgatcatgccactgcactccagcctggacaacgtagcgagactttgtctctacaaaaactttaaaaagtactaaatatcatgaaatacctctccaagcctttacccctacttggctcctaggatactgacagccttgcttacgttatactctctagagtggtataatatggggaatatgattaactcaagaaaaaaaaaaaagatacagactttagacctccaattaaacagcccaatcagatcatcctgtagtgaggctcagagttggcaagcttcatacatacacggtttctagtcattgtagagatccactctgaagggtgagcagcagttaaagatgatagacatctgaccctctatatagacctaaataaataggaaaaagcaacttgaggccgggcatggtggctcaggcctgtaatcccaatactttggaaggccgaggctggatgatcacttgaggtcaggaatttgagaccagcctggccaacatgatgaaaccccatccctactgaaaatacaaaaattagctggttgtggtagcgggcacctgtaatcccagctattcagaaggttgaggcatgagaatcgcttgaacctgggaggtagaggttgcagtgagccgagatcgtgccactgcactccagcctgggtgacagaatgacattctgtctcaaaaagaaaaaaaaaaaggaaaagaaaaagcaacttgaatgaaatggagataatacagagagatacgaacttataaaaatcattaagcatatmcttaaagagataaaagataatactgtagccatgaacaaaaacaagaaggtgtaaaaaggtaaacattcagagaactagaaacagcacttggaaataaacacatcatggcggggaaaagaaaaaagaaaaaccaaagagttgataataggccaggtgtggtggctcatgcctgtaatcccagcacttgggaggccaaggcagtggatcacctgaggtcaggagttcaatagcagcctgaccaacatggtgaaaccccatctctactaaaaatacaaaaatcagccagatgtggtggcagacacctgtaattccagttacttgggagcctgagtcatgagaatcacttgaacccgagaggcagaggctgcagtgagccaagatgtgcgccattgcactccagcctgggggacaagagtgagactccatctcaaaaaaaaaaaaaaaaaaaaagaggagttgatcaagttgaaatatttcagaaactagagcaagtatagaaatagatgtgactgggtgctgtggctcaygcctgtaatcccagcactttgagaggccaaggcaggtggatcacaaggtcaggagattgaaaccatcctggctaacatggtgaaaccctgtctgtactaaagatacaaaaaattagccgggtgtggtggtgggcacctgtagtcccagctgcttgggaggctgaggcaggagaatggcgtgaacccgggaggtggagcttgcagtaagccaagatcgcaccattgcactctagcctgggcgacacaacaaaactctgtctcaaaaaaaaaaaaaaaaagagatgcaagagtgaaaaaaacaaaaacaaaaacatagaggatcatcagttcaggacaccctctgtccaagtaataggattcccagaaagaacagaaaaatactggaggataatcatcaaagaaataattttaaaaaatctcccagaactgaagaacgtcagtttccagattgaaaaggcccatcaagtggctaactcaatagatgaaaataacccacaccatggcaaattgctgtaaaaacagaacactgggaacaaagagaagatcctaaaagctttcagcaagaatgggaaaagggtcacatacaaaggatcagggattggaatggcattagatttttaaaggctaacactgaaaattaaaagacatggaggctgggtgccatggcacatgcctctaatcccagcactctgggaggccaagatgggcagatcccttgagctcaggagtttgagaccagcctgggcaacatagtgagaccccatctacaaaaaaaaatttaaaaattagccaggtgtaggtacatgcctgtagtccagctacttaggaggctgaggcaggagggttgcttgagctcaggggatcaaggctgtagtcaaccatgattgtgccaccactgcactccagcctgggctatagagtaagaccctgtctcaaaaataaaatacgacaatggaacaatgccttaacccctgaggaagaattattttcaacctggaattctatatcctgccaaactatcaatagtgtgaggaaagattaataactttttaaaaataatttcaacttttattttatctttttttttttttttttttttttgtgacggagtctcgctgttgcccaggctggagtgcagtggcgcgatctcggctcactgcaggctccgccccccaggttcacgccattctcctgcctcaacctcccgagtagctgagactacaggcgcccgccacctcgcccagctaattttttgtatttttagtagagacggggtttcaccgtgttagccaggatggtctctatctcctgacctcgtgatccacccgcctcggcctcccaaagtgctgggattacaggcatgagccaccacgctcggccctattttatcttatttgagagaaatctcattctgtcacccaggctgggtgcagtggcaccaccatggatcactgcagccttgaccccccaggctcaagcaatcctctcacctcagcctcccgaggagctgggtctacaggcacataccaccacacctgactaatttttaaattttttgtagagacagtgtctcactctgttacctaggctgatctcaaactcctagactcaagtgatcctcctctcttggcctctccaagtgctggaattacaggcaagagccaccatgcccagcccaacttttattttagattcggaggggggtacctgcgcaggtttgttacatgggtatatcacatgattctgagatttgggatactgttgaacccatcacccaggaagtgagcatagtacccaacaaataatttttcaatccttgcccccacctctctccctcctccaacagtccccagtgtctatcattaccatctttatgttcatatacccaatgtttagctcccatttataagttagaacatgcagtatttggttttctgctcttgcattaattcacttaggattatagcctccagttgcatacatgttgctgcaaaggacatgatttcattatatcttatggatgtgtaataacattttaaaacatgcaaagcttcaataaatttacctcttatgccaactttctcaggatgctactagagggaaagaaccattcacccaaatgaaggagtaaatgaaaaaagaagatatggaatctaagaaacgagggatccagctaaggaaagaggcaaaggaattaccaagatgataatggagggagatccctggagggcaattgtgcagcaaggacagatggaagcagagcagagggctccttaagagatgcctctcagaagatggaatagatagaacgtgtcatgcattcaaaagcctggagagggaaattcagagaattgagggagtgtttgaggttgacttgctgataactacatagcaaactaggcaatataataataataataattctaaggataaaatgttgtaagaaataaaaagtaactatagtaaactacatggcttagctgtgaagagcatttccaaatcctaataaagtaaacactgagtaattttattgcctattaggaggatggaagatgggaagggtatctgtatggcaggggagtggggagtgggatgaaagttaaatcctgcctgggcgtggtggttcacgccttgtaatcccggcactttggaagtccaaggtgggcagattatttgaggtcaggagtttgagaccagcctggctaacctggtgatgccctgtctctactaaaaatacaaaaattagccaggcgtggtaggtgatacttgtaatcccagctactcagcaggctgaggcaagagaatcgcttgaaccctggaggcggaggttgcagtgagctaagatggcgccattgcactccagcctgggcaacaagagagaaactctgtctcaaaaaagaaaaaagaaagttaagtccctaatcttatatagtgtgggaaatcaatagaaaatgcctgaaatttaaataccaagaaatagcaatataaatatggagattaggaggtaaataccaaaataaacaactaaataaataataatagttgtttctgggaagtaggaccaggatgggagaactgttcatgttcataatcttgtggaactgtttgcctctttaatctctgtgcatctgttactttgattagaaataaaactgggctgggtgtggtggctcacacctgtaatcccagcacttttggaagaattgctttgagcctaggagtttgagaccaacctgggcaacaaggtgagaccttgtctgtacaaaaaataaaattagccaggtgtggtgcacgcctgtggtcttagctccttgggaggttgaggtgagagaatcgcttgagaccaggagatggaggctgtagtgagccatgactgtgccactgcactctagcctgagtgacagaacaagaccctgtctcaaaaaataataataaaagtaaaactaaataaaactagttttaaaaagtcatttgtggcagcaccttgggttcacagagcagaatgctagaggcgaaactatagagatgggcgagagccacatgttacaggcttttgaatgccagttgctaaaatgtttagatttcattctctaagaggagggcggagttccctgctattgtagatgttyggattcggcactctctaagagcagtgcaatgcctataaaggctcttgagcagggagagacaggttcagacttgtgcttagggaaggtaacagtgcatctgagctggaacggacgcttgagattaccctgtaagtcaaatttacttccagtacagacaggtagactggtgtgtacaggcaagaaggcctgaatgcccagccagkgggattctgatccttctaagctctggccaaccctttcccctctcggtggctgctaccaatgccctgaaaagactagggaaccaggttagctctctttattccccagctcctgcctccttttggcccaatctacttcctgattaacaccctatcttgctattctttgtttctatgtctttctggtgaatatgggcaggctcaatagtcagtaccctgtggctgggcatggtggctcatgcctgtaattccagcactttgggaggctgaggtgggcggatcacctaaggtcaagggtttgagaccagcctgaccaacatggtgaaacctgtctctactaaaaatacaaaattagctgggtgtggtggtacacgcctgtaatcccagctaattgggagactgaggcaggagaatcgcttgaacccaggaggcggaggttgcggtgagctgagatcgcgccattgcactccatcctggacaacaagagcgaaactccatttcaaaaaaaaaaaaaaagaagtaccctaaatatgaagttcaaagcttaataggattggattttaatacttaacatttactgagaccttcctctgtgctaggcactgtgctgagtacttaatagacagcatttcagaatcctcacagctaccctgtgaggtaagtgatttaatcctgttttacaaacaaagagactgaggctcaaagaagatatgtctaatcagtggtagagctgaaatgttaggcagcagtctgtctgcttctgaagcctacactgcaagccgttataattccatccgtcttaaagtgaaacatggttggctgaaccacaaggtagtggcctgtggaaacgctggggaaacccatgccccagaactgggactaattccttctcccactcccccaggcttacctgcgagccatcgatgtgaagatcctgcagcagctggtgaccttgaatgagggcatcgaggcagtgcgctggctgttggaggagcgggggacgttgaccagtcattgcagcagcctcaccagcagtcaatatagcctgacaggcgggagcccaggccgctcaaggcgaggcagctgggacagcctgccagacaccagcaccaccgaccggctggacagtgtctctattggcagcttcctggacacagtggcccccagcgagctggatgaacagggcccacctggggctccacgttccgagatggactgggcaaaagttatagctggtggagagagggccaggactgaggtggatgtggcagccaccaggctagggagcttgagagctgtgtggaagcccccaggggagaggcttcraggtggaccacctgagtcaccagaggatgagagtgccaagctgggcttcgaggcccactggttctgggagcagtgccaggatgatgtgaccttcttgtaacaactattccacccttttgtaatcctgtggctcttttatccattagatgtggtctcccccaaaattgattctccctcagtctgagactaggaagaggctgcactgaaatcagttaccatggaaacctggctcatcatttctctagtccctagggagtctctgcctttatccctcaattattgggtccctagagctagcttgctctttctttctttctttctttttttgagacagggtcttatgctgttacccaagatagagagcagtggcatgatcacagctcactgcagccttgacctcctgggctcaagcgatcctcctatttcagcctcccccatagttaggaccacaggcatgcaccaccatgcccagctaattgtttatttatttattttttttttgtagagatagggtttccctgtgttgcccaggctggtctcaaactcctgggctcaagggatcctcccgcctcagcctcccaaagtgctgggattatgcccagcccctagagatacttctatagagatattgactctaaaggattgacctatggcttttggtatttagtatctctcactactccccccagctaagtaaggatttaaggaatttaggactccctggagttaacagatgaagagatgggggcataattacttcacccaaagtctagaagccttggcctctctcttggccaagatggaggattgaggagggacatggaccttcaggactaaccctctatggattggccctcccagaagcgtttgggctggtagacccaccccttcctacctgctgagtgatgtcatttcctgccaggatgggtagccctttgtacgggtccttggatggtagtaggtcatataggggcatctgagcccctgctgctaagtgagatcacattatttatcgtccataccattacttcttgtgaacagtaacatgtcactcctcctggcaggaaagtttctcattgtcagatgtttgtgcttcttttcaggtcttactttttaaatagagtgttctcattttatcctaggggatctcacttcctctgtggctccatccctgcatccctgtctgggccagcactcctgactgcttttagggagagaagctttcaggggcctccatttatttctctcaagtctgtttggctcaccctgccatggtcccctgtcttaccctgtccctgtgttgcccctattcctgtattccatttttttgttttgttttgttgttttttttgagatagggtgacagggtctccctctgttgcccaggctggagtgcagtagtgctcactgcaggctcgacctcctggactcaaatgatcctccttcctcagcctcccaaggagctaagactacaggcatgcatcaccatgcctggctaatttttgtatttttttccagagacagggtttcaccatgttgcctagggtgcacttgaactcctgggctcaagcagtccttccgcctcagcctcttaaattactgagattacaggcatgagctgctgtgtctggccctattcctgtattctgactccatatctcccttccaggaggttcagcttctgtgtgtccatgccttttcagtttctccaggccttttatatgcaaatgagtcctggcctcctctgccctttgttgatgggagccagggagagagaacctcaaggtctcagagctctgggggtgtaccagaatcttggataggggaggtgtcatcctttctgactttgtgactgcccttcccccaccctgtccccagccttccaccatttggtcacaaggatgcctgcctgaggtcgggacacaaggaatctccttgtctaggctgcagcgtgggggcgtggcagggaaagacagaagctctttggtcccggggccccatcctggaaaaggagagggagcaagggaaaggcctgtttacttcctcccttagagcaagccctgactcctggaaactgaggagagagcagagcctgggtctctgagcctgggtcccagagccctgccgaattacaaattatatcatagaaggaattcagggaagctgccaacctggggctcagaggggacggtcccagagatggggacaagagctgtggctggtgtcagagaatgaattcttagagattaaccctttgaactctggggtaactgctccatatgttagtccctgcctttcctgggccttgaaactgggatactagaaggaaaaagatggaaaaggatgtcagatgactttggctgttcactgcatcctcctgcaaaagaggcgtcctcctcaaatcctggaataactcgtgccatttctctattttgtattctgtgttggggaagggaaggaagccaaattgatcatctctgcttccctaaattcctcaagtctcattttgaaactcccaccccggtccttctggagcaatattcagtccatggcttgtccctaaacaccctctcttcccctcccaccccctcaaatgattgaaatgtccaaagtatattctcagcttcttccactgctcacaagacctctccataccactcctatggtcttgggactcctgacttcccctcagactgggaatttgaatctcctattccagtccctactctgtagtcattttgtagtgtgccctcggttaattacccttcctgtttttttttgtttgtttgttttgttttgtgttttgttttgtttttgagatggagtctcgctctgtcatccacgctggagtgcagtgacgcgatctcggctcactgcaacctctgccttccgggttcaagcgattctcctgtctcagcctcctaaatggctggtattacagacgtgcaccaccatgcctggctaatttttgtatttttagtagagacgaggttttgccatgttgaccaggttggtcttgaactcctgacctcaagtgatccgcccatctcagccttccaaagtgctgggattacaggtgtgagccacctgcctggcctgttgttttatttttaagacagggtctcactctgtcgcccaggcgggagcgcagtggtgcgatctcgggtcactgcagcctctgcctactgggctgaagtgatcctcctcagcctcctaagtagctgcgactacaggcacgcatcaccatgcccgggttactttttgtattttttctagagacagggttttgtcatgttgcctaggctggtctcaaactcctgggctcaaacaatcctcccacctcagcgtcccaaagtgctgagattacaggcctgagccaccatgcccagcctttatttcttttttttttctcttcagcaacattgttcatggaattatacccttcttggaagacactgtatagtattcttatttgaggttcacttgttcagtctacacacttatgagctgaagaggttgcccgccctcttgtggccattatgcaccactgctggagttgctgtgtggaacctccaagctcaaataaaacatggccttctaaagaccagcccccgtcagtgcgcagaaaggctagtgagtcagacctaaagagggcatagacttgcccagcatcacccattgtaaagttgtggcgacgtccaggtcagaaaacccagatcacaagcccacatgcccacagctccatcacctggccagtcaacaccactgaagcccaaagggactgaaagcaattttgcccctgttacaatgtttgcgttctcacctcttcctaaagaggcagcttagtctttagaggaagagctgcaggaaagaaaaccctgggcctggactggatgaaggggtgaaggatgcactagtctggatcacagataggaggaaaaatcaatcctggacccaccatttttctgggaaggagggctagtagctccagacatcataggaacagagctcagcatttcagacctggaggttagaagcagaggtgggggtggggagctgtgaaattaggaaacttagatgggtcttgcagaagtaggtgtggctccacaggtcagggaattacgggtcaattggatagcacctgagagtgttgtggggctggaaagctggggtgagtgaggctgcctgggtattccgcttaggtctaggcatcctggctgaataccttagatttcagttcaccaccagagaagcccggaaactccagtaaacacatatctttggtcccttctacctgcctctaacttggctggttgaggctcagcttctctctaactagacttttctggcttatagggtacagctgtttgggagctcaaagaaggagaaggtaagaaaaagggcagaaatgcagagagaggagaggatgggatgaaaacggggtgtggaaaatatcagagggcgcatactgccctcaagtgcactgggggcttttgtccggggtcagagtaaagacaaagaagaggctgctcatgaaagctgcagaaacagtgcctggggggataagcgggggcggtgctggctgagacaagagaccatgggagtgggcattgtaaagacctgcatttatttattttatttatttatttatttattttgagacagggtctcactctgtcgcccagactggagcgcagtggcatgatctcggctcaccgcaacctccgcctaccaggctcgagcgattctcctgcctcagcctcctgagtggctgggactacaggcacacgccactaccacccagctaatttctgtatttctagtagagatggggtttcaccatgttggccaggctggtctcaaactcctaacctcaagtgattcactcgcctcggtctctcaaagtgctaggattacaggcttgagccaccatgcccggctgaggcctgcatttaggatggaggcattgaggttgagcactgagctaactggaagctcagtgacagcttcagtgagaaatgcttgagagttgtagcagacacaagctcattgtgtgtatggtgccaggcacacactgggtgttccgtgacacctgttcagtgaatggaagaatgaatatgtgtaagcccacaaggagatgtgactgaaaaaaaaagttgctaatttacaaattagataattgaaaatatttttaaatttactttttagcaatcctataaacagtgcattgttaacaatagtcttacttataaatttgctcaaggtcagttaagtaacaaatgagctgtaataacccagatcaacctgactgcaggggcttccaggaagcctcctctgattccctacccatgccatacactcacttagaccctactctcctaggagaacagattagtgctgcccagaagctggggcaggacattagtttcctattgtcactgtaatgaattaccacaaagtggctcaaaaaacaaaattattatgttacagttcagaagtccaaaatcagcttcaccaggctaaagtcaaagtgttgacaggtctacactccttccgtgggctccagggaagaatgtttccttgctttttccagcttctagatgctgcttgcagtgcttgattcgtggctcttttcaccatcttcaaagccagcagcagagcatcttctctcctctctaacctctgtttccatccctacatctctctaattctactgcctctcacttgtaaggattacattgggtctactgggataattcagtatcatcttcccattggcaagatccttaattaaatcctgccttcaaagtcccttttaccatttaagacaaaatgttcacaggttaagcagctggtgagtgtctgtagtcccagctactcagggggctgaggctggaggatcacttgagcccaggagttcaggccagcctgggcaatatagtaagactcttctcttaaaagaaaatttatatttatcctcaggtcctggggattaggaattggacatctttgggagaggggcttttagcctgacacaggcagggtggaaagtgggcaggaggatgcacccaggcccagaatgaacctctgtgctttgtccagcctcccctagcctggaatgagaggtggtaccaaggcggaggtggcaggtccagaccccatgtctagagaatgtcaaatgcctcctgtaccatcaccaccagggagagccaaagatgaagatcaggcttaggagaaagcctcagtttaggaatcgttttagacctgagaccttcctggtaaccacagtggaggattcctcaacactgtctcctctccagaaccattctgtgctcctattccccaaggctgaagataattatattcccagtgaactaacctgggttctctctggaaagggcagattgattagttgtcttctttttaaattgttatttttaattatttaatagttaaaccatgcttctcatagcatagtgaattccatcaccaggcccctttcttattttattttcttcttttttaaaaaaattttagactgggcacggtggctcatgcctgtaatcccagcactttgggaggccgaggaaggtggatcacctgaggtcgggagttcgagaccagcctggccaacatggtgaaaccccatctctactaaaaatacaaaaattatctgggcatggtggcgcatgcctgtagtcccagctgctcaggaggctgaggcaagagaattgcttgaacccaggaggcagaggttgcagtgaaccgagatcatgccactgcactccagcctgggcgacagagcgagactccgtgtcaaaaaaaaaaattattatttttttaagagactgggtctcactgtcacccaggctggaggacagtgatgtgatcttggctcactgtaactttgacctcctgggctcaagcaatgctcccacctcagccttctgagtaggactacaagtgcacacgagcatgtccagctaattaaaaaaaaattttttttagagattgggtcttactgtgttgctcagcctggtcttgaactcctggccttgagaagtcttcctgcatcagcctcccatagtgctgggattacaggtgtgagccactgtgcctggcctcttcttttgatccctcatccctattctcattcctctccctgtgtcagtatatgtttggatatgtatgtatctttgaaaatatatgtaattatgtgcctatgtgttttaatatatataaatggtatacttttatggtaagccaacttctgtaatgaattgctcccatatttcagtgatttaacaccacagatttattttt

SEQ ID NO: 93459 - DNA, 12519 bp, Homo sapiens
cgcctgccactacgaccagctaatttttgtatttttagtagagatggggtttcaccatattggtcaggctggtctcaaacccccgaactcaggtgatccatcctcctcggcctcccaaagtgttgggattacaggtgtgagccaccatgcccggcctaataaccttcatttttaagaacagttttatatttgcaaaaatattgtgaagatagtacagagaattcccatacaccaggcacgcagattcccctattattaacatcttactttagtatggtatacttgttacaattattgagccgatactgatttattattactacctaaagtctatactttattctgatatccttagttttatcttttcctgtttcatgatattatactacatttagtcatcatgtctcagattcttcttggctgtgtaagtttcttgtttttgatgaccttgacagttttgaggagtactggtcaggtattttgtaaagtgtctctcaattgagatttatacaatttattttatttatttatgtttgtttttgtttttgtttgagacagattcttgttctattgcccagggtggagtacagtggcacgatctcatctgattgcaacctcttcctcccgggttcaagcaattcttgtgcctcagcctgggactacaggcatgcaccatcatgcccagctaatttttgcatttttttgtagagatggggtttcgccatgttggccaggcaggtctcgaactcctgacctcaggtgatccacctgcctcagcctcctaaagtgctgggattacaggcgtgagccactgagccctgcctagtttatttttgtacaaatatattttgtacaaaaaaagcccttttgatgaatgtttggtttttttccccaatcctttgctattacaaacagtgaggcaatgaataacagtgtatatctgtaatttcatgtgttgcaggtgtaaaggataaattcccagaagtgacgttggcaggttaaggtgtaaatgcatttgtaattttgatattattgccaaattaccttccataagaattgtgccagtttatgctacatgcataagagtgcctgtttcctgacagctttgccaatagggcatgttgtaaaacttttagattttcacctgtctgatagaagaaagctagttatctgtatggttttacaattttgataacatttctctgattatgaatgaagatgaagtattttatatttattaacacttattataaatagactcttttccattctattcatatatatatgaaagctattgctttctgaataataatttcataatatggagatgatttcagctcaatattttagtgatgcttgctatgtgcctctatattagggcttgtatttatatattgaatcctgttctcaaatgcaatagttattaacaggctagtttccaagaaactgttattagccatcttaagagatatctgaggaaggttgcagctctggtttctagtaaaaatgttgttctgtgatgtgtttcctttactatcttgtacctttcttactcatgtcagctaggacctgtattgttccattatttttttctgtggagagcagagatcatcacccaggtatagaaaagtgaccttagcactaccccactttatcagcaagctgcaaaaatgctgcagtcacatctacgaaggagttgcccatcctgggcgaagcatttattctcccaaagggagaatgatattatattataattgccctaggaagcaaattaattctgaagtcttttgaaggaaaggatcaatatgtacctttcatcttcatgtagaacccttatgtgtatttgggaagatcttatgaatgatctcaagagtaagcgtctcaaatgcaggcaatgacaaaatcatggcttcatggatagaagaaaattggacaattctctcttttcctctaatttgcttaatttaataaatcaacaatttattatgggcctttcatctttttagatagtggtatgagctctggagatataaacatgctatgacactctctctgatgcccaatataattataatttaagtgaaggagacagacttgggaaaagataattatgaatttaagaatttatgttttaagtgctattaaagagaaatgcacaaagagtgttacagagacaaataattatctaggggattggtggtaggaatagagaggtaaataagaggaagtaggatattacagacaagatgatatttaaggaagagtgaagaagattgagagagactgaattgtctaatattatatgaaccctgactcaactggtccctttacaagaaggccatctttcctaaagaatgggacattaccctggtcatttgtatgatgattttaggtggcatactgatatgacttcaaataaaattggtttgctcagaaaattattctctttaaatccatctgattaaatcaaatagaaagtctgtttggaactggtatcctcttttgatatcttctaacacttacactactttttaaatatagagatactgggctcaggtccagagccttcaggaagcaataacatttaataattttatattattttcatcatatttacttagaagataactttctatttctggcaaatggtgctggtttgctacttatagttgtgatataaagttatttattcacttattcacacaacaaatatttgttgagtaccttctgtgtgccaggcactgttcaatgaacttgtgaataaaatattagtggataaaacaaaaacttctgtcctgaggaccctataacatagcttattattttgcttgattattgttttttaagtttaaaaatgggtttaattttaagttagtaagtaaataatratacatatcatagcagtacaggatacaggtcagagatagtatagaggagaaatgaagatgaatgctacatcaaattgcctaaggttgaatcctggttctaccagctattagttctgtgaccttgaataagttgcttacttttttgcgcctcattttcctcccttgtcaaatattgtgacaattcactacatgttgattgttgttgttgatattactattattacatagattgtcaaaatcctgaaatttatattcaaatgactgaatttggggaaatattggactagattgtttaaacaattttttaaaacaatgcagggtctgggcttactttccttcttagcattttattttgatataattttagacttacagaaaagttacaaaaatagtactaagaattcccatgtacgcttcacccagcttcccctaatgtttacattttatgtaaccatattacaattgtcaaaactagtaaattaacattggtataatactattattagttaaactacagactttatttgtattgccctggttttcccaatatcatttttcttttctaggatccaatttgggatcccacattgcatttatttgcttatttttggtttttctttttttaattaattaatttatttatttatttgagatggagtctcactctgttgcacaggctggagtgcagttgtgtgatcttggctcactgcaacctctacctcctgggttcaagcgattctcctgcctccacctcccaagtcgctcggattacaggcccatgccaccacgcctggccaatttttgtatttttagtagagatggggtttcgccatgttagccaggctggtctcgaacccctgacctcaagtggtcctcctgccttggcctcccaaagtgctgggattacaggcatgagccactgcacccggccccacattgcatttagttgttacgtccttttagttgccaactatgtagactttatgtagactcggtgtctccttgacattcatgaccttcacatttttgaagagtactggtcaggtttttgtagaatgttcttcagtttttctgtgtctgatgttttctcatgattaaatcaagtttatgcattttttgataagcatacacagcaatgatgggcccttctcacaacatcatgatcgggggttcatgatactgatatgtcttattacagtaatgctagtctccatcacttgattaaggtgctatttgccaggtttctccactacaaagttactatttttacctttattattaataaatatcttggggaagatatgttgaaattgaaaatatcctgtttctattccactgattttaagcattcattaatggatcttgcctgcaacaaatattagtgtggtgttctgtttttaattttctatttccctcattttttccatatttattaattggaattttatgtaggctgtctcttttgttccattagtttttaaaaatgcaattatttgttaatatcaatatgaattcataaatatttattatgtggattgtaatccaatgctattgttacttactttttgatcaaattgcttcagctttggccactgggagctctttctagttggcccctatgtcttcctgacatgcccccattattttttttagcactccttacttttttggcaccacatgatgcctcagactcaccttgtgttttccctgccccagcctccacaagcacttctccaaagaaggtcttaaataaagtaaaattttacaatataaaaattaaacagggctgggcatggtggctcacacctgtaattccagcattttgggaggccgaggctggaggatcacttgaggccaggagttcaagatcagcttagccattatggcgaaaccccatttctactaaaaatacaaaaattaggccgggcacagtggctcacgcctgtaatcccagcactttgggagcctgaggtgggtggatcacctgaagtcaggagttcaagaccaacctggccaacatggtaaaaccttgtctttattaaaaatacaaaacttagcagggcatggtggtgtgatgtaaacccagctactcaggaggctaaggcaggagaatcgcttaaacttgagaggcagaggttggagtgaacagagactgtgccactgtactccagtctgggcaacagagcgagactccatctcaaaaaacaaataataataataaataaaaataaaaatacaaaaatcagctggtggtctaattagctgtaatcccagctactcaggaggctgaggcaggagaattgcttgaacctgggaggtggaggttgcagtaagccaagatcgtgccactgcactccagcctgggtgacacagcaagactctatctcaaagaaaaaaaaagaaaaaaagaaaaaaaattatacagaaaaaaaattaagaatatgaaatttaaatgtaaaacactttagttaaaaattgttttaaaaaccaacacaaggtttaacatagatgaaagtggcatatatttttttcttagaatttgactgccacttgaattatagttttcctcacagtgctaggttaacagaattaatcagatgatcaaaacattatatcatagggcagtggagggatgttatattttgggtaaataataatgtaattcgcagcataagaattaagggcagtcaatctagagtcagaatggctgggctcaaatcctaattccactacttactagctgtgtgacaccaagcaagttacttgacttctcccaacctcaattttctaatgggtaaaaatgaggttaatgacagtacttaaaaagtttaggacgggcgcggtggctcacgcctgtaatctcagcactttgggaggccgaggcgggtggatcacctgaggtcaggagttcgagaccaccctgaccaatatggtgaaatcccatctctactaaaaatacaaaaattagctgggttcggtgtcgcgcccctgtaataccagctactcgggaggctgaggcaggagaatcgcttgaaccaggagccggaggtcacagtgagccgagatcgcgctattgcaccagcctgggcaccaagagcgaaactcctgcgaacatggccctgcaagcagcrcggagcatgcgggccgtgctctgcagcctgcgcgcgctctgggcacccgccgtgccctgcctgccaaggccctggcagctgggggcgggcgccatctggacgctgctcacaggacccgttctgctctgggtgtgtaaattcacagagaagcatgaatggataacaacagaaaatggtattggaacagtgggaatcaataattttgcaaacgaagctttgggagatgttgtttactgtagtctgtctgaagttgggacaaaattgaacaaacaagatgagttttgtgctttggaaagtgtgaaagctgctagtgaaatctattmtctttaatcaggagaagtaactgaaattaatgaagctcttgcagaaaatccaggacttgtcaacaaatcttgttgtgaagatggttggctgataaagatgacactgagtaactcttcagaactggattaacttatgagtgaagaagtgtatgagacatacataaaatctattgaggarcgataatggaacccctaaataaactagtatgaaattatgcaacccagcagaattgtcttaaattagcggtggttagaagacttagaatagcaacttttagcattaccgatggggaaaaaaaaactactgttaacactaatgaaagaaaatgccctttatctttcaaatgattatagacaaacataatattcttctattttataatactctatgatttttagactaggctctagtattcagaattcattaaattatccatggtaaaaactagttataaaaattacataatgtttgcagatgacatgattgtatatttagaaaaccccatcatctcagtccaaaatgtccttaagctgataagcaacttcagcaaagtctcaggatacaaaatcaatgtgcaaaaatcacaagcattcctatacaccaataatagacaagcaaccaaatcatgagtgaactcccattcacaattgctacaaagagattaaaatatctaagaatacaacttacaaagggaagaacctctttaaggagaactacaaaccactactcaaggaaatcagagaggacacaaacaaatggaaaaatattccatgctcatggataggaagaatcaatgtcgtgaaaatggtcatactgcccaaagtaatttataggttcaatgctatccccatcaagctaccattgactttcttcacagaattagaaaaaaactactttaaagttcatatgggaccaaaaaagagcccgtatagccaagacaatcctaagcaaaaagaacaaagctggaggcatcatgctacctgacttcaaactatactacaatgctacagtaaaaaaaacagcatggtactggtaccaaaccagatatatagaccaatggaacagaacagaggcctcagaaataacactgcacatctactaccatctgatctttgacaagcctgacaaaaacaagaaatggggaagggattccctatttaataaatggtgctgggaaaactggctagccgtatgcagaaaactgaaactggacccttcctcacaccttatacaaaatttaactcaagatgggttaaagatttaaacgtaagacctaaaaccataaaaaccctagaaaaaacttaggcaataccattcaggacacaggcataggcaaagactttatgactaaaacaccaaaagcaatggcaagagagccaaaattgacaaatgggatctaattaaactaaagagcttctgcacagcaaaagaaactatcatcagagtgaacaggcaacctacagaatgggaaaaaatatttgcaatctatccatctgacaaagggctaatatccagaatctacaaggaacttaaacaaatttacaagaaaaaacaaccccatcaaaaagtggacacaggatatgaacagacacttctcaaaagaagacatgcagccaacaaacgtgaaaaaaagctcatcatcactggttattaaagaaatgcaaatcaaaaccacagtgagataccatctcacaccaattagaatggcaatcattaaaaagtcaggaaacaacaggtgctggagaggatgtggagaaataggaatgcttttacactgttgatgacagtgtaaattagttaaaccattgtggaaggcaatggattcctcaaggatgtagaaccagaaataccatttgacccagcaatcccattactggttatatacccaaacgcttataaatcattctactgtaaagacacatgcacacgtatgtttattgcagcactgttcacaatagcaaagacttggaaccaacccaaatgcccatcaatgatagactggataaagaaaatgtggcacatatacaccatggaatgctatgcagccataaaaaaggatgagttcatgtcctttgcagtaacatggatgaagctggaaaccacattctcagcaaactaacacagaacagaaaaccaaacaccacatgttctcactcgtaagtgggactttaaaaatgagaacacatggacacagggaggggaacatcacacaacagggtctatcgtgccattggggggctaggggatggatagcattaggagaaatacctaatgtagatgacgggttgatgggtgcagcaaaccaccatggtacgtgtatacctatgtaacaaacctgcaagttctgcacatgtatcccagaacttaaagtatataaaaaattacataattcaatgataatgttattcttaagccttctataatgttgtaacttgtgtatatctatacctggatttgggttgaaacacttaatgatctttccgttggaaataactgggagcgaagaagtttttgttgcttgtacagtgtcagatgaagaacaacactatcttaattttgcaatatactgcatttgctggtgctatttttacactgtgaagcaacagctttgcagcaaaataataaaatacttttttgttaaaaaaatagcaaaactccatctcaaaaaaaaaagtttagaagagtttctggcacataatggtataaaatatgaccaccaatttacagtgctctttacatcttatgaaggactttcaattatattagctcattttatcacacaatagcacttagtgtatttattactatttcaaacttacagataaagaagctgaggctcagaaaggttaagtgactttctgagatcttacagcttaaaagtgggaaagggaaggctcaaaccccaatcgtctggctgcaaactctgggtaggaatgtaagtaccaactgtggagtagaatattaaacaattaaaaaactaatgtgacaaaatttcaggttaacaaattacctaacaattcatataatagtatcagaacttcaatgcaggtctttaactgaccttcttttcttaatctggtctatgacattagcttcaaagaatgtcaaaaacacctggctatatttatgcaaatttgtatacatgtgctttttttccaggaaaagtgttcatatgtttcatcatgttttctaaggggtttataagccccaagaagttaagaacttggctggaattcctaattctctgacaagctgcttcgttagagtggttattatttggatgtttatattacttttaatggtagaaactgcaattacctttataccaacctaatatttgaagtgacaaataggggacaattctcttctcgatggggaaatggctaaatttttaaaaatctctttttaaacttttttttttttttttttgagacggagcctcactctgttgcccaggctggggtgcaatggcgcaatcttggctcactgcaacctccacctcctgagttcaagcgattctcctgcctcagcttcctgagtagctgggactacaggcatccaccaccgcacccagctaattttttgtattttagtagagacagggtttcaccatgttgcccagggcggtcttgaactcctgagctcaggcaatccacccacctcggcctcccaaagtgctgggattacaggcatgagctaccatgcctggcctttttaaactttttatcttggaattttccaaaaatcacaaaaattcaactctcatataatactcagcttcaaaaatgtttaacatatagccaatcttgctttattaataactcccaaagataaatggatttattcctgcattattttaataaaatctagcatcatttcactttttttctgacaatattcaagattgtcatatgactaaatctaaatataattcctatgcaccatagagaagcaattgtaaagtctattattcattcaacaaaatttttggggttacctaatattatacattgcaaagcactagaggagacgcaagtataagtaagataagattttcactaaccttaagtaattaaaatacgacatcataaaacaccttttagagttctagatttcagcctttagatgcctttaaaattgctcaaggccaaaaattagtattcatccttgatttttcaccttctctcagcaacccctcttgcctatcaaattcatcagcaagtccaatcagctgcatctccaaaacgtatactaagtttctccatttcttttcatctcaattgctgttctcttaatcctagcctccactagctttctgctgggctactgaagagtcttctaactggcttatgtatttctactcttgtctattttccattgtctgcccagggagatatgaacaaaaacattgaaaacaacataaatgcccttcaaccaaggaatggagaaatcacgacatgttaatccaagaaaatgctaagtagttgctaaggattaatgagcatggataaatctcagcaacataatactgaaggtaaaaaagcaagtacagaagaatatgcacagtatggtaccattcatataaagtttaaaaacatgcaaggcagtgctacatattgtttatagatatgtatgagtatgtgtggtaaaagcacaaaaacatgcaagaaaattacaagcataaagtttagaatggcagttacctttaaagagggaggagaataggactgaaaagagtaccatggggattttaactgaatctgatttcttaaggtatcccttttcttgttgtctgtaagttcttagatgcctgaaaaattttataattaaaataaaatcagatcagatatttttattttaattataatatataaatcagataaacattactcactcatataaattcttcaatggcttttcattgttcgtaaaaagtcccaacctgttagcaaggtacaacaggtcccatgtgatctggtccctgcctgcctttccaagctcatctttttccctctcctcattaattatcaccttgctgcctttttttctgttccttgaagaagtcaagcctgttactgcctcaggaactttgcactggttcttgcctcttctccagatcattccccagtatattcacttatttgcttcttgctcttcaggtctcagctcagacaagcctttccttgaccatcctatttaaaatagtccccaccttttctgtctttctctacacatcactctttcatccccttcacagcactaattacccttgaagaactcttgtttatttatttattagctgacgtctcgtactagcatgtgagctccttatctgtctttcccactgctatatctctggcaattacaacagtgcttcatgcatgggaagccctcaataaacatttgtggaacgagtgaatttattcttattctgaataaccagaaaaacctagacttttttggtgaagaaatagaagctagaaatctaaatcataatacttttggtggggggtgggagggggtgttgttttccaaatgtgtcaacatttctttaccatgatccatatcaaaggattataaatccaatttgtatttgatgatagagactgatatttggctccttttcattgtctttaatatggactgtaaaattgggtgatttgattagtttgtgtgtacttaaatgtactgctgtgtgtctactgttgaaccatgttgcactatcttctactttttctaaaataaatctggaaacaagtaaaccatcagttccctcctaaaatatgagtcatattaaaggcatcctgacatatttctacttgttctaagtagaactctgaataattattgatactgtagaatgttcttaaaacataccatccttagtgaactcaactttggtcttttatagataatggagatatttttgttaggaatgtccccttgattagcaatcatttctctaaggacaagttctgccttgttgaggctgccctgagataacccaggcttgtgatgcatggctaacaattaattttcctttggaagttacttcaaacctttatttttcaaattcacaattgaatctatgctgcacatttctcgagttcatcacttaattcaatagcaattcaaaaaatcttccaaggtttataaatttgatctttaggttaaag

SEQ ID NO: 93460 - DNA, 23525 bp, Homo sapiens
ttagctcccaccaccacctaagaacttcaaacaaatgagggaagcattatgagatagccagtaagaggggagcacagggcataaagatcaggacactgaagtctcagcatgatcaccaccaccctgtttgactgcctccaaagatgctccaaaaggggaaaaaagtgatacaagaagacagttcctgaaaatacgctaaggttccaattattctatacagcaaggtcaatggtgcaaactggagtggtatgtaaagagagtaaaaataatttttactccttataaagagatatatatatatagcaaataagtattatgtatactttccagttaatttgataaacgtctatgtccttaactttgatgggaataatgttcttaatatctaataaatgctatattttaaccaaccataaaattttacaagccaccatatctaagatacaaagaaaaatctttaatacaataagctcatttagaaagtggcttaataaactttgtaatgactttagcaaagtggaagcatcattaagggtggtacatcacatacacccaagaaaaaaaatgctattagctgtaagaaattatatatctttttaaaacatttaattttttttttttttttgagacagagttttgctctgttagccaggctggagcgcaatggcgcgatcttggctcactgcaagctctgcctcctgggttcaagcaattctccagcctcagcctcctgaacagctgggattacaggcacccgccatcatgcccggctcatttttgtatttttgtagagatggggttttgccatgttggccagtctggtcttgaactcctgacctcaagtgatccgcctgccttggcctcccaaagtgctgggactacaggtgtgagccactgcacccagccaaaacatttaaatttttaaaagagcataaagtaactttgtaaagcaatgggaaagctgaaaaactgacataaagacaacaaatgcaaatcataaagtagcttttaagaatttagtgggcagaacttctataggcttaaaagtcatttaaggtttcaagttttgaagttcttgagaaaccaatgaaaagctggaccatttactaactcaattggagcatttactaactcaatatatacatttattgtccatcctttccccaagctgttctccagacatttctattaatatttatgcctgacttctctatcaagaattttccaactatccctcagaaacatgcccccttgtgtgtgtgacacacatatattttaattagcaaactgcccctaaggtggaatgaagttttcactaaactatcatgcttaaaatgttagtattctggcagttacagaaactacttattaaataacactgtgtatttttcttactgttgaaatttttatttagtggcttcatataaaaacatatttcattatttgttcacattttcttttatattacatgacgaattttgtaattgtcttacatgtaactataaaaatttgggtaaatttgccattacgagtctctaaatctttgatattgtgcccagaaccataaacactttgaattgctttaagaccctatatttaaaatcattttaaaacatgaattggggtgaaagtggagaggtgcttagtccctgaattataaattctgtagagttttctgccaaaactgagagcttctcgagttcttgaataaatacagcaaaaaggtaaaaccaattctgaattcggccagcagacagacattaaccagaacattggtataaaaagaaagctttgtttaaacaaataatgaggaatacctgttcactagaaaagtatccatgcacatattcaattgcttttaatttgtattctgtcaaaacagcctaaaaaaaaaaaacacacacacacagagtaaaacagcattaatatacgtaagcagcacagtaatatacatctatcaaaactgcccaagcaactcaacagtggcaggtctacttcagccctgtcattcagaggaactaaggtcactgtggtgagaggcccttccttccatctttccaggttccatactgtgagggacacactgagcaagcaggaagatctgctgggcttccctaccaacttctacaaagaaagggaataaaattgtaatagatatgattcaacatcagtatacacaacatttagaattcctaaatatgtaattaaagagtttcaaaacattccaaatccaaattgtcatttttaagattaaacatatcagatgttactcattcatcaattattgaatatctactatgtgctaagtgacagagaagcaagaataagacaaggtctagttgaggctctcagtatttctatagggacataagaatgcaagaagtcctgaattcaatgtctgtgcctgccactaactggcagtgtagactttgagaggcattttaattccttttgagcgtcctcattcatagagggaacaccattcaccaacctcaaagaattactatgaagactataatagtggacattagatgtgacatataacaggtattcagtaagtgatggttcctttccttttcggaatctatcagtgggtgagagagaagttggtggctttgatgcagcactatctagagcccactaaatcacacatgctccccttgcagctatttgctcagcttagagatggaaacagctatcttaagtcagtagccactaatcattaaaaatgaactaatccctttgcttgtactataaaataattttaatattcatatttttcacatatatcattctgctaggagaaagtattatgaccagtcaactgaaatatcctgggtgctcagtagttcaatattcactgaaaagggagaaaatggcattctaaataatgtattcctaggagttttattatcaatgtaataatcggacacagtcaaatacaagtttctgaacaaagtcttggattgtactgatgccaagtcatatctcaattcttccatcaatgcctgagaggcccagctgtaaccccaggcaggacagcatggtgctctgcaagcatagtttgaatactgcccccagcccccaacttaccacctagggagtcttgagctgatagttaacctcacagagaataggccaccagctataagcaagaagtacagtgcctacacctcatgcgttgtaaggagaatcaaaacaaataatgactggagaaagtgcttaaaaacaggctcacaaagtaagtgctcactaattaatagctatcattccctcctttttgaataatcagttaaccattgctttttccccctttctactccctttcccagttcttctgctagtggcttcttatatgcctctgttttaaatgacagtagtgacaatcagtattatctatcatataaactcactgtgatactcaagagatgacctggtttaaactgacttacatttacaaagaacgatttttaagaaaatcagtagtaatgctcatatttagatatgccaatattttattccattttaatagaccatgacaatgttgatgtgtctaatcactcggcaaagccagcagaagatatattttaactgctgaccagaaatacagacttaagttgccatctcatgtgaacaacactttcatatctggaaaatttcctattcccctctttagaatttactgtgacgtttttatgacaccaggaagagaatatgcacactgagaccctgtatcttccaaaagtaaaaatctgctggtctacttggactcaccaattattttctcatgaaaagtaattaaaaatcagcccaagaacaaattgtgacaaatttctaggcatataattagcaaaccaatattttatttcaaaaattaattggacacttaggtttgcaaaagcagaacttgttcaaaaaagaatgttcagtattatcaaatatgaaaacttaaacacgtcaatttgaaaaaagaaaaaagctgtataaaaacaaagcaaaacagcaagaccagagacaattttaataatagctttgtaaactgaaataagcaccagagcacatggcaacaatttcttccgtttcagtcaagggtcgtaaaggtatgcagctgacgaaagaataattgcccggaaggccgaaggaaagcaccgtgtgttgatgtaacaatggtacatcaagtccttacattttaaaataagtaacttctcggtatttttgtgcttgagatattgttaggctcaagactaccttccagaattgttgctgtctggttcactctgggaaatgcgatccacacaacagcctcaaaaagcagcaaaaacttggaaagcaggagaaaaaagttttgaagctcaagttattgacggccaattcctaagaacgtgactttaaacttaatgccacacttaccatcaggacacgaattttgcatggccaacgcaacaaatatactctaccttatgcttagatttgaaaaccccatcataataactaccataaaagaaactttctgcgtattacctctcgttttcagtcactcttgtgttactgaaagatgaggcaataaactcaaaaatattaaaccccttacccaaaaagtacagagctattacggatttgtaaagccggctttggaaccgagggctttacaaatgtaattcccacgacaccgtgctgagtctcaaatttggcgttaaygtaacttaatttctatttgtactggaaacgtatcaagatataaactcctccattacacgtgaaaattcaaaccaatttggcaatcctaggacccttattctgcacaatctccatacagtacctcaaagagagtctaaaacacgagaattcatctcataaaataattcatggaatcggtctaattacctttctaatttcatccagcaccatttcaaaggactttttatccatcttgactactatcccgacgtggttttaacagttatacttgcaattaaaagacgttcatccctggtctgctccgccgatagtaaaaaatatttatagctgaggaggaaaaagactccacgagcaagagaggatgcgaagaggtagagagtattgcaaacttcgcaaaaaaaatttctaaaaattgagattcagaaaaactctttttattaaaaagaaaaaacactccagtcaggcttccccagcttattcacacaatggttcagggcacctcgggcaagagccaggtcctctgagttttgcagaaaaacccgggctcggcggcaggtttgagtgcggtttccctgcagctgagggccaggtgccgccagaggtagctcttgaaggcgctttcccaggtggagcggccggcagagtagaaacacctgcgctcagagtccacgggcggcggggagggaggcgccggtctctcgacccgcacctgcgcctcggccgccggccgcgaccctcaccgccgcgaacccggacgcatggtccggctcgcgctcatccccagccgctccgcccgactcctggatacctcggccccggcagcaggcggcccggcaggctctttgttaccagctgctgcagcttccgggagcgggccggcggctggggagcaccaggagccgggcgaagaggggcacggcctcgcatagggggactccggaaaaacgcagccccaacagcgccagacgccctgcctggttacccctacagcccccaccagctcatggggacctacaataaagccagtcgcgcccaagtaaactcaacactgcgccgccagcttgggcccctctttcctgaaagccagaggtggggtcctggtgtgggaatataggcatccatagcggatgcctggatggtaggaataggatgtggcaaaaatccttcccgaagcctagcggtcattattttgaatgtcatccccaccatacctcgtgtctgagtgtgcgatgttttgattttgccctctggattaaaaagaataaatggcgagcgattaaggcatatctacgggcgcccatactttggtggccactgaaagtcagcggcgcggactgccctgagggcgggaaagggtggtcactgggtcagcccgaagcacctgacatgagggcggggaccccgaaatgcacacgaagtccggaactggtcttctgtgattttcattcgccctggtctctgttccctttcgtactcaaagctcgtgcatccagggaggggaaaccggagatagggtcttcgggcccmgggcagaccctctgtgccgctgcaaaccgttgcagcctgaggctgtcaggtcctcccccagacacctgcggaccctccctctcctggcttcccrtctggtcatggcgagattctgggtctgcgtagccggtgctggcttctttcttgcatttttggttttgcattcgcgtttttgtggctctccagtgagttgggtagtgaggaaatgactgtcgggtgtgcgggtagccctgttgggaggcgtcgccacggtcgtggcatggaggtggcaggccctggttccctcagtagcttgtctcaaagcctgcacctgggtccaaactgccttgaccctttgagtttaaaaatttgtgtatgttacatcgccattttcctctttcccaactcttactacatcctcaaataatttgcagacttgtattgtggtcgtgttggtctttaggcatctaagctcatttctttggaattatttcagtccagcaaacttctagttgtcaaggcatgcttaaaaataagccctgttacccggcccccccgccctttttttgttcttacctagacggtaaactaaatctgaattgtctgattttgtttaaggttttgaggaactttacttttgcagtttcctggagaactgagaaaattckttaccggctggatgtgggttggcctaagcacccagaatattttaccggaacaacattttgtgttgcagttgactccctcaatggattggtttacataggtcaagtaagtaaatagagatttaaaaaaattatgaacacaaaggaagtaacagccttcctgtcttgctgtagtaactgaccatatgcgtttatatcatgctaattgtgcaatttatttttgagttggtctcaagtattttggtttcgaatgtgaaagatatgttagattttgaaagtggtttttgtagtaaaattctcagttattttttttcttcgccaagatacagattacctttcctttaagctgatcctaagaagttattttttgtataccttcagagaggggataacatcccaaagatattagtgttcacagaggatggatatttcctacgagcctggaattatacagttgacacacctcatggtatatttgcagccagtactctatatgaacaatccgtctggatcacggatgtaggaagtggtatgtatagtaatatctattaaattatcttactggaaatcacatctttgcacatgtccttgtttgtattgtttaaaatcagagttgctgaatctaattgtaatttctttaacgattcatgaaatcacatgtttttaacaaactttattttgtacttctgtggaattaagaaatttaacaagggctggacgccgtggctcacgcctgtaatcccagcactttgggaggccgaggmgggcggatcacgaggtcaggagatcgagacgatcctggccaacacggtgaaacccccgtctccactaaaaatacaaaaaaaaaaaaaaaaaatcagccaggcgtggtggcgggcgcctttagtcgcagctactggggaggctgaggcaggagaatggcgtgaacccgggaggcggagcttgcagtgagccgagatcgcgccactgcactccagcctgggtgacacagcgacactctgtctcaaaaaaaaaaaaaaaaagaaagaaatttgacaaggagcctgttaatatgatctttccttgaacttgtctagggtcttttcctctttaaagcatcagttgctcttctcagattaaataactctaaactgaagccaaataaagtggcagtctctgaaagcaatgactggaatccttgactcttattttccttttccagttttctttcataaaagattgtgaaatcgtaactgctttgttgctcaaagtgcaaagattgcagaaactgttgttaatgtttttgaaattctactgactgaagcatgtctgaaatcttcctgccatcaaatatttttagtagaaaaagctgaaaaatgaagtgagcacaactgaatgtgcagctatggagaaagttttcagagaaacaattcacctgtggctgtagcttaagacaaggcaatacctgagatatcctggcattaccctaggaattcaggaagaaatgggattataaagacattatttctagtattccttggcccagttatgttcttgaattgagrgacatcctggttctacagtcctggctgattcagataccattttttagagataatgagttctcagtttctgtaagtagtgccattatcacagctgttctcagaacccataagatttctgggcctcagctgatggcccatttatttcatgctgtgttttacatagtatgaatctggttcaaccaaaaaaagtctatagattatcactgagtgaattgttaatactatratgagagtctattttcacttttttcctgaagatccactgttaaagaccatttctttgagttcattttattcatgtgatttttaaaaataagacttccttgattcccagaaataaaaagagcacagacgatctcttcattttttccattacagctaattttctacccagagatctgaagacagttttatattcccatttcccaaaggaataaatttcctctaatgaaaaatatggctacaaattagccttttttttttgagaaaattttttattggtagtcttttttgctagtttttagaaacttggaggcttatgtgttttttattgctatgaactttagctcaactgtctaaaagtgtaatagtaaataaattatttaacatagaattgtaatgcaagctgattcactttctttctggtaagctcaatgtatccagtttgtcttttgaatacctatcaattaatttggcatatgtaccttcaaattgatttctgttcactgctttatgatattcccttattagtagtctgctttatgctcttgcttgtaagataattttaacttaaagaaattttaacgtgagaaaataagatactcatgatttacaaagattattttcttcttagcaaagaaaagttgggttgaattttgaatgtctccacaaggtgaaaatgcagttaaaaaaaaaatctgtaccatagagaacgtttttgttgacttactgaaatttaaggtctgtatgtgagtgattgaaataacagtttcaaatataagttgttccctttacattttcttcttgatttcctttcataagcaatgcttattcaaggtcataagattaaaaaagaaaatggtgcaccaatactttgttagcattctgagtttcctgtataatgagtcaattatggggatgttatttatttgaatttagaatccgcttattttggactaatggagattttaattcgtgatcaaatttggctgtaatttacgaagaagctatagtgcttgtcaattatatgtaatttcctaagcctatcacctatttgttattatttacttctatcaaatttttgctcttagcttacttgaaaaatctgaatgtttgtatagtggttttatttgtgagatgtacatatctatctttataggattctttggtcatactgttaaaaaatacagttcttttggtgatcttgttcaagtcttgggtactccaggcaaaaaaggcactagtttgaatcctttgcagtttgataacccagcagaattatatgtagaggacacaggagatatttacattgtggatggagatggaggattgaataacagattgatcaaactgtcccaaggtacattacttgtttatggtattataaaaatattataaattgattttaatttgttcgatatttggtataatgttttaagtgttgtgtatgaagcggtgtgtaaagagctaagtgtattactacgagaaaactgaaaaacagatgggtatgattgcccacaataaatgatcctgataacaggcccacttattcttcaccaaaggccaggagattcctccaaaagtaactggcaacagtatgagaatttctagtgggctcaggagataagtgtgtatcctatttaattaagcatgtagaaattagaaacctagaatcccagactcaagtatcctacaggctgattaatcagcaagcattttattgagtgccctttctgtgtcctctctagtatcaggaggtgcagatctattatgtattgaaacaatgaaatgtagtctatgctattgattcttaaagcaaaatggacttaggaggagaaactaaattgcctggagaaatagaacaagatatcatgaaggaagtagttattgaactaaactagttttggtgggaggagaggggaggatggatggaacattcatggagggtttatcatgcatggtctacaggcatttattagcaggaaagaaggtgaagatgcactttttcagcagcagaaaatacaatttgggatgtttctgaagtcttatttgaggattattaaagccatgtttttgyctataacatttttgaggttttcctagtagaaaagtgatgttacaacagcaggttttataagacattcttttaggatctacttcaagtgagctctgtcatttggaggctgtgtagtcaatttatcaattagtaactgaatttggttgataacagttgaaagggaaatgtagaataaggataaagcaagaatccaaaaaattgaatgaaagaaacaacgaaatctaggagacagattgaatataagtgtattagtttcctgtggttgccataacaaattgccacaaactgcgtggctttaaacaacataaatttattctcacagttttggaatccagaagttagaaatctggtagactgtgctcactctaaaggtcctgccttgccgcttctagtttctggtggctcaagcattccttggcttgtggcagcaaaactctgatgtctgtctccatattcacatggcggccccttcttctctgtgtgtttttgtgcctccagtctttcccttctttctcttaataaggatttagggcccaccctaaatccaggatgatctcatgagatccctaatttaattttatctgcaaaaactatttccaaatagcatcacattcccaggtatcaggagttaggacttggacatctttttaaaggaccacagttgaacccaccgtagtgcgtaataaaggagatagacggtaaaatcataatgtgaatttttaaggtctgtggaatactaatatcaagtaacagataagttgggaaggggaaccagttttagggagaggatggcataaaccctaaacaatgattttgaagcagtcatgaaaaattcaagtggagataataattaaagaagtagattaattccctaaagcagagaaggaactttaaaaaaaaaactgtaagaaatgggcaaatgggcatatagacaggaaagccgagaaagcatagtcaagtgaaccagcggtgtaattaaatagttctttgtaacctgtttcataaaatatgcaartgcatgagacattctatatgttgctctgactatatatttttaccgtttatagatttcatgatcctttggctgcatggagaaaatgggacagggcctgctaagttcaacatacctcacagtgttacacttgattcagctggtcgggtacaaatacagcgtcattgtgtctgggactttgtgtctgaatatgtttgtgkkgtgtgtgtgtgtgtgtgtgtgtgtgtgtgtgtgtctgggcatgtatatatagattgtggtatacatgtgtgtctgggcatgtggatacatgtgtgttagtgggtatgtctgggtaattactctggggctgggtgtgcacacatactttcttacaagtgtttgagtcctatagtgagggggttccccaaacatttagaaaggagcaaaatggatttcctgtaccatttaaaaggatagaaggcacaaataatggatctgaacataaagttacctgaaagaaaaagttgccctcttactgggaaaactccactaaaagtgtttgaatatcttttcacttctcaagaaaaaaatgtgctgatctaaagtggagtgggagaggttaaccttggaagtctgaaaaagagtcacctaggcaaactcttgttctcactaactccacattgtttagggaacagaaagctttagccaacaaatttcaatcagtttctctcttttctaccctactcactactatctcttttgcatttactcaatttctaagcatagatctcacttctttgaggttaccttttcacaacgaaaccgccaccaaaaaatttgtatattagtttctcctgctcttttcctatagcagcctgtacttcrtatcatagtaactatcatgctatattataatcatttgtctgtctcccctaatagatgtcaggctgttgaaagtgcttactgaatctcttttgctttatttctttgtgcctagtacacagtagtcatatttatttattaaatgactaaatgtcttgacacacaatgggtacattaggctacttgccttcataccattaggcatttaatccatttctacttctgattcagtgctcagcaaacaaacttctaattatgacttggcttcctaatcataattgattgacaaaaatgagaatgttttgatcattaaatcttctgatctgccataagacgttaatcaaccatgtgaactttgtatataaattgggaactggaaactttgaattaaacttttgcacattatcctcctgagcttgggtgactcattgtgtgctaagaaaaaaaatcaaatttcagaacatgcgagacctcgacccaggtaaattcatcatggtgaggaacgcccttctaaaaggccttggaaatcatctgatgggggtactctggcattcctgagtgataaagagtgtcaattatacaaaattgtgttttataacaatagcaattctgttctgagcattttacataattaattcatttaatcatcaccacaaccctatatgaaaggttagtcagttccagacttgttgttatgtgttaaacaggagttcccataatcaaaattcattgagtgttgagcaggacagatgatgctaacaatctaaagtatcattccatcctagggtgtaaactatacttcttccttggtcatttgtctgggatactagtctcaaactctttaagaaaacctatccttactaaaggaccatagatcaggaaaagaccttgagaaattgctttactttggcatcaacaacctttcttaaatggtgtagtgagttttgatttgtttctgattggagattaattcaatggctaccaaaattcacacatattgatgaagctgtaatcagggttacctgtgaagaaattatctctcaatccacaaacccaagaaatccaaaggaccaaaagcagggaggtagaagtaaagaggactgacccactcccagtccattctttcatacctctctacaaccctggccacaagtcatcaaaaaccatttcctgccgggtgcggtggctcacgcttgtaatcccagcactttgggaggccaaggtgggcagatcacgaggtcaggagatcgagaccatggtgaaaccccatctctactaaaaatacaaaaaaattagccgggcgtggtggcgggcgcctgtagtctcagctactcggagaggctgaggcaggagaatggcgtgtacccgggaggcggagcttgcagtgagccgagactgcgccactgcactccagcctgggtgacagagcgagactccatctcaaaaaataaaaaaaaccatttccctttatgctttaagctgcatgcatgtggccatgaaatgtcatttagaatgcatctcacttcttgtcttagaacaagttccttaataacccattacagcctataacaaacctaaattaaacctattactgttctttatttgttgctaaaatacctcaggcttcttcagttggttcagcactctgtacataccttggtaatagcaggtatgggtttaatgatactgcaatatgaatgaatacctcacatcctgctatattgagctcttgagaagtaaggctgcttttctttgtcatgttgcctggcccaggagctgacaagccagtagtactcattgaaaaatgaatgcttgttagaggaatgaatgaatgttgtcagttttcattatctactgatcccctgcattatggtagagtactccagctttttagttattcacacatttagaacagtagacagagtattataagctttgggttaagacagctttgggttgtgcctctcccatttgtaagctcacttcagagacggcaacctttctgaactttagtttttcctcatctgaaaatgggacttaactaccttctttggaatcctcttaagtgagataatgtatggtgaaactaatgaaaataaacattcttttcccttttttcttctcatggatatttttcaattgacatttttgtgtgtttctcaggtgtgggttgctgaccgaggaaataaaagaatccaagtatttgataaagacactggggagtggttaggagcatggaataattgtttcacagaagagggaccttcttcagtcaggtaattgtttcattttattgcaaaatgcttgttttagttagtgtatgtgtctcacttcctctgaatagctagctgaaagtttaaaatatttattgttaattttgaattaggggaaaatagaaatatacagagaaatttgatatccaagattttcagatgccaggtaaagtgaaaacaagaaataacatatgctagacctctcctctagcctttatttggtaaatgtttaaacaggacaaaaatcaaacccagcctaacatcaattcttcattaatttcattttgtggactatgatattgatacttttaacaaatttaagctaatctttggctttgcttaccatcatggacatcttattccttcataaacagaattagatcaaattaaaattcttcttaaaagaatcattcagcaagtaggtgyctactgttgtttggcacagtaggggattaaaatgttgaaaaaaaatacccttatgttttttcacagacatttattatgttaaatgtctttctccttaggtttactcctgatgggaagtacttgattgtggcccagctgaatcttagcaggctctcagtcgtagcagcacccccagtgggaagcattggggagtgttctgtgatcagcacaatccaactagcagatcaagttttgccacatctcctagaagtcgacagaaagactggagcagtctatgtagcagaaattggagcaaaacaagtacaaaaatatgtccctttgaatagctatgttccttcatttggttcataatgtttctttccygggaatatttcaagtggcagttcagattctcaattcacyaagtgcttaaaaatgatgttcaagcacaagaatttatttttctagtataaaagatctagtatcagaaagatttgtttttgtatcattaagaatcttatattttgttgccctcttgggacttagttttatttgtaagtgcataaggatattttaatgaaaggaaagtaactaaaaaatggggttgggaagagggactaaggtggtaacctcattatttgccctggtagactgattctccctgggtaaaaaaaatgggaataaaaatgagcttgcatgataatttattaaatttcatgtgaagaactccagacctccagattgtgcaactaacataaartgagctgcttgagagattgtaaataagatgaactattgattaatttgagtacccacagagtgctgtgtcttgacgacttaaaaatgaaaaagcaggattgccttttgagtagcttgcagtctagtggggagacaagcaggcaaacagtcacaacacagcaaaagcgaccttggagcatagtgggacttttggagtaggagtgctgcatttgactgagggaatcatggatacttcgcaggagaagtgaatttgagctcagacttgaaaactgaggaggagcttaccaagggacaaggaggagaaaacaataatttccaagtaaagaaggtataaaaagttagaagtgtactgtaaactttgataggcttttaggccttttttaaagcccaacttggcttctgtccattacctataagatatttaatgtcagtcagcctttaaatgtaggaataaaatggctggcatctaagcactttagtaaaagaggtttttacaaataactaaggattgtagagcttccttctctttttttttctttttctttcttttgttttacatgaactcaacttattcctaacatttgtctacctcaaagaaatttcaagattatttagataacatggatatgtgccaaatcctttgagctgttaagatgataatttcctgctttcctcctacatcttctcctcccactccctcctttggtgtgaatattggcttcccaattaagacctttttttttttttttccagtttgttttagcttattataggttttggaggaactttgccattttgtaatctttcaaatcattcttcacccttcctcacatcagcttcctgcttttcccagtgttttactgtaaattgtgtagcatatgacaaatcttgagctgactttcctcttcacctgttatggctggagtattttccagacctgaagggactcacacttgttttgatacttggatcacatctccgtgaggttaggaaggtaaatctaccaacaggaagccctgtactctgtattccaaggccattggtaaatgtgttggtgccactgatcggactgtatgaccttaaacaagtcaccttagttttcagtgaaatgggaatatcattgtctcctctttcatgaatgctgtgagaatcagatgtgcaacaggtacakacttgccctttgaaatctatacctctggatacattagaggcattttattaacaaaggcccttctaaatgtgctatttatttgacaataactatcagatttgccttaattttgtgtttatagcatttatcaaaacgtatcctcatagactttatgcagattaatatggtcaattgatttggataaaagaaagtaatttcagggtttgtttttaagccaggacaagaagtgcaaatgcctctttgaagcaatttaggctaaactgattttgaaatttcaaaatgttttattttactttgttttattaagccaggacaagaagtgcaaatgcctctttgaagcaattcaggctaggtaaaccgattttgccatttcaaaacgttttattttactttgttttatatcagagtcttataaaacctgctgcaaatatttctgaatgtctttgtaaaagtgtttgttagtgtacctgtgattatagtacttcacttttttcctttggattaattggttaaatgaatgagaaatgtgttatgttttttactaaaaagtataaattaaaattttggaaagaaaaggcaatattatctggctccccaattaaagtttgattttattgtcacaaaagcagtctataactttttattcctttaaagaatttcagcaattatgaaatcacaagttgatgctgaaagaatatcccacttttcacacatatagcgtgtaagctgatgtgcataaatatgactagaagttgcttagaacatttaaagaatgtagcttgttttgaggtggtgggagggtacaactgacagtaataactagctaattgtctacatttctgcattaaaagtggaacatctttatacttctactttttaggtctattcttggagtggggaggggagaaagtgttctaaattagaaaaccaaaggctatagatttagctctatctttccctacctgtaccatcagattgggtctttcaagtggaatatttatcgatcagagaaaacttggatgaaatctgatggtgaacagagatttaccacgaatttttttttttttttttttttttgagacagagtctcgcttggtcgcccaggctggagcgcaggagtctcgctcgctcggtcgaccaggctggagtgcagtggcgccatctcggctcactgcaagccccgcctcccgggttcatgccattctcctgcctcagcctcccgagtagctgggactacaggcgcccgtcaccacacccggctaatttttttttttttgtatttttagcggaaatggggtttcaccgtgttagccaggatggtcttgatctcctgacctcgtgatacgcccgcctccgcctcccaaagtgctaggactttgttcttaggtcacttaacagattaaaagactgcttcaagcaatgtagtgtaaggctacggcaataaagtcctattttgttttgcctttgctgtttttaagcacttttgcatttgaaaacaggacagattggatagtcagcattaaaatggaaactcaaatttttgctttttaggcttaccaaaataaatgagagtttttaaaagtcctaaatttattactttaatttgttgtattctctgctatatattttcagcaacaataaaaaatcaaaataatcatctttattgattcagtaaaaagttttgagacaacaaacatataaaagcactcagtcaagtgtcctctgctctaatagttccctacctggttgggaaaacaagctacttaaaccttgtcttttagtagttttaggagataccatttttggcacttgtgttatgttacattcttgatacacaagaggtcagtagcgttctgcttataagcatttcttgaaatcaaacatgggctaaacttcatactttggttgtttttttttttaattgaagctacagtgttcaccatactttcattgtttttcttttttctgccacttgcttacatcttaaggaaattgctttatgggtgaaacattttccaagcattgttggaaattttttactggttaattggacttgtccacaattaaaaaaaaagtttaaaccttttcagtaattcagactaacagccagaagtgaattaacttattttaaatgaaggtgaaactataatctgaatgtgtgagtttagtacaatagagaatgaatttgtattagtggggaatcattcttttttctccctagtagttgttttttgttgtcgttgttgctgttgtataaaaaaaaaaaacaatttcaccttgtggttgctactttacaaataagaaaaataagttttttataaagactcttaggtcatttcttcatcagctactctggaatccatgagtttataaattaatcctctaaacgctaaatgacatgtagatgctcctttggtgtataagaattgaatagaatttgagcaatgaaaaataacactacttaaaacttattttttccattgtaaacaatgaagtaatatgacttaattctgcttctatgtaattcataaataaaaaactcactgtaacattaaaacaagcatgtcctacatgagttacatttaaataaattaattttaatttaaattaatttaatagattaatttgcgtgagtcacaacaaattgatattataaacttgcttctcaattttcagccgctttatcaaaggaagaaaattttagttgcatggtgcagattctcagatttgttcctagtgagaattagttactgtaatatgtgttagaaatttttttttacaatacgacatttatatacaaattgtcacaatcaccagttaaatgtttttataacatttttcttcacagtgtgtataaagaagtatttaaatattttgatgcttcctgtattgaactgaaatactwatttttacttaactaaagggatgaaggaactaactatatgtacgtttgtttttaatcaacattaattgaggtaaatgtattcagttttgtgtggagcgtatgggggttacgtttgtgcagtctgtgtgcatatgtgtaaatataaatgtgcatctaaagggcattatgcccaactaggtcagaagaactggatcaagacagttgaaacaacatggctaaacgttaagtcctcatgggaggacacctggtttggcaacaaattatttgaaaaagttttggaaagtttgttggccaaaaatattacaagccttgttaagaaaaatgttgcaatcttagacaacattgaagtgtagatttaatggcagtttaatcgacaagatagtctatatatctagtaaatagctccgtggtgttgtttcctttggctactacattttaagggggcatcctataaactgtttaacccaaaagcagtgtgatggttaatattgagtgtcagcttggttggattgaaggatgcaaagtattgttcctgggtgtgtctgtgagagggttgccgaaggagattaacatttgaatcaatggactgtgagaggcagccccaccctcaatctgagtgggcaccatctaatcagctgccagcgtggctagaataaaagcaagcagaggaacgtggaaggatgagactggctgagtcttctggtcttcatctttctcccatgctggatgcttcctgcccttgaacattggactgcaagttctttagcttttggacgtttggacttacaccagtggtttgccaggggctctcagaccttctgccacagactgaaggctgcactttcagcttccctacttttgaggttttggaactcggactggctttcttgctccgcagcttgcaggtggcctgttatgggactttaccttgtggatcatgtgagtcagtactccttaaactccctttcatatatccatctatcctattcatcctgtctctgtagacaaccctgactaatacaagcaggtaaccaaaataacagtgtttggaaataattctgaagtctcagagggtgatcatgtagtagagtgaatagaattctgcactttcctccagaactaagacaatgagtacaaataatagagtggtccattggatcagcccaataaaagaaccctcctctagcagtggaatgggctgtagcagtggatgtggtaaagcttggtgtttcacagcttggaatccagagttaggttgacctacgttctaatccacgccctgcaactaatttgtattgttttgagctatgcctcatttttttgctcatttgtgaaatgggaatactagtattttccttatggaattattgtgaatacaaataagatcatgcatgtaaagcattaagccctgtctctgacatgcaataagcactcaacaaaccttaagagattcacgtgtggtgtttcaatcagacaatggcagtcatgctaccacctttgggcagggtttgggagaatggtgagaccacatgaacttccctattatataattctgtgtttagtcacagtattgaaaattaaaggtaaggctgtaatatactaaagcatctatcatttagaaatgccattttaaaaaacatggctatttttagttggcattaatgctgtttatccaacaagtaatttatgatcaaggtaaagactcccaccttctgcaatttatattctagttggagagacagaggaaattgagaggaaaaatgggattttggttaacatttatggtatacattaacacttagttggttaagcaaatayccattttcagtgttcttctgcctttccttccactactgtaacgactggaagagctgggtgctcacttcctcagcctgctagcaactagaggtagctctgtgacgtggctctgaccataattggaagtctactggtagacttctagaaaagcatttgcttttttgattttaaaaaatagcagcatcactcctttatccatttcttccctgccttgaacttggaagtgatgcctgaagttgcagtagccgtctcagaaccatgaagccacaaagcagcaatcttaaggcagaaagataggagcctgggtttttagcatgttagggaaccactacattgtccttgtatttcctttctccagacttctttttatgggagataattaaatgtgactaaagccactgttagttgaatgttttcttgcaggtgaaagcattcctaagaaatgtaatactgagttaaactgcattaatttgagaaagatggatatttttattgttttaagattctgtatccaggaatatgtcattccaatgtcttatgtcctttaagattttacaagtttttttaaaaaaatagatgctgtgcctttttctcgtgacaaatttagattcctgtatcaaatttattccatgcatttattaccgatactagagtaggatttttccccatttctatttagttattggaggtatagagaaaaggaatcaatttgttttatatataatatattaaccttaattaatttaatttaataatttaatgagttaatttaacaattaaccttaattattttaattagctattatggacatttggattttgtgggtggagcactgaaaaaaactatacatctttcaatatttgtattgcttgtttgattttcaaaattttattacattagctacactatttaaaacaatgttgaatgatagggggatatccttatcttatttctgattttaatggaaatgtttgcactacaccaattattaataatacgatatttgctattaagttttggtaattttcatatttcagttctttgtctcttagagttttattaagaatacttaattttattaactggcttttgacattgatgtagacaatatgttgatgtaatgaatgttacagattatttttcttatgttattggaaaacattttaatcatgatgtcttgcttggaacttctattcttgaaacacaaagggcagtagagttctatttatacaatttactaattatgtttcttccatctccaaaaggaaattgagtttccttacaataaaagaatacattaaaatagaaaaagtaatgtcaaacaaacattttatagaaagtacatttattggaaacctggattagtaatagttacagcaataaaatattaagttaatttggagttttcttgtagctgtggcaaagaaggaaatataaataattctcatttaatgaaatcttatccattctttggaaaaaacaagctcttgttttttctttttctttttttttttggctcaacttgaaaagtttccatagtcttccacaaattatagatatcagaagaaactttggttatcaacaatagcaataaaagtgatttttaatggactatattattaaatagat

SEQ ID NO: 93461 - DNA, 14845 bp, Homo sapiens
caaggggagcacatggatggggccctggggcagattgggcatgagccaggaggagttcagctctggttccctgggcagactgtcccactctgtgccctgcagtcaaaggggaatctgttccataagaaattgttggttttgttttgttttgtttaaatggagtctcactctatcaccccggctagagtgcagtggtgtgatctccgctcactacaacctctgcctcctgggttcaattgattctcttgcctaggcctcccaagtagctgggactacaggcagccaccaccatgcccggctaatttttgtaattttgtagagatgggatttcgccatattggccaggctagtctcaaactcctgacctcggttatccacctgccttggcctcccaaagcgctgggattagaggtgtgaaccaccgggcctggccagaaactgttcttcaataccagstgacctctgagctgagtctcactgaagagggccagcctcatggcatctgaaacttaggaaaaaaggtcttgggccaggcagctgcagctcgaaacttggcccagcccagaaggagaaggcccagggagtgaggcagcctcttcaatgtgcgcagacctacctaccccaggaggcgggcagaacaatgccatggaaagcaccctggataaaggcaagagccccaagttccagtctccaggctcctctgggcctccttttagcccattgtaaagtagagctgataaacctcttctctgcctgttgagcctctactcctgagcccatcaagggccaggtgagtgaagtacaaaaagggccttataaactagaaagcaggagcgccttgggaactgagggatcacagcggcagcagggagtcaggccgtagaatgctagccaggtagcaggctctaaattgacacttatagactttttcaaccttcatggcaaccctctagctctttttttacagatgagggaaactgaggctaaggagttaaacaacttttccaggggcccacagccaataagtggcagagccaagcctccagttcagtttctgtcccagcctggagcacatgctacggactgagacatatacgactcagagctctggaaaggctccttgtgcaggcactggcaggatgttctgtgtctgtcccttccttctgtgtctgtaagttctcagcttacagaacaagccctgactctgagcaattgacctgtatttgatcatgtttgcaaagtggtgtggaattgatagaaaaggcacaaacaggactccgtgcttctctaagcatagtccttagaagggcactttgcatggttttcccagcaaaggggatggtttgtgctgccccagcttgctccttcctcagcaggatcaagggtgtgattatgcaagctgatgggccaggagagggccacagtctagacctaaaaccatttcccttccaccctaagccaactcatttaggaaccagccaaagtcccagccccaacacgatgcctcatatgaccagcctggccccctgagctctcctggcctcaagctcctgggacactcattgtccctatggtgtctataagtcaaagaaaaatatcttacttctcaaccagtgtagaagccatgggagggcaggccccatacccggcacatacacccacccagctcccagccaaacttatacaattcagaaagttcttggttcctaaaaaagccaagccatagcctcacacgtgtacatgacacttaatagtatctggcatttgtggagtgtcttgaacttgttaaagtcctttcatttatctaccctgacagaccaatgggcaaacatgccacacacagacacacaccctctgtgactcacagacaaaatactttcatacaacctgtagccccaaatgaaaatgacaaaagcattaagcatgaagtaggtttaaaactgatgcagtcagaaagtagaagccatctcaacccaaccactggctctggtttctgccaagaagcatgaaaattggagcagggatctagagtcaggcataatgggtgctcctgcgttctgttcagagaatccaagaaggagtgtccagaagggtttcccctagaacttcattccctctaagagatgcaacattgaccagtatccatttagtcatctctccaaacatttattcaatcactcagcaatgattcgtggagcacttgcttgtgtcagcagaaggcttcccagtagaagacaatgacacacaaaatacagttcatggtctgggggagcctacagttttgttgaaggaagtaccaggcatgtaaataacaccttagagcacattggagtcagcgttattgacagtagatcaaagtactaaggtgtgagaggaagaaaggctattgaaggcatcatagaggaggtaattttgagtagcgtactgagggaggggtcggagtgggcccagtgggtggacaattcaaaaaagacaccactggtagagagagggaaatctaatgtggtgggggaagtattggtaaggcatcccacatgttcagtataggcgtcataatggaggaggagagatgatggggaaggagctgaaggtgtaggttgaaactgattgcattggtctctttgtgctatgctgcagatttgggactttgctctgtgggcagctacacatcaggaccactgggcagcttttaaaaatccagatcctgaagccctacttctggtctcctgaatcagaatcagggagcatggcccgggcacctggatttttttaaagctccagtttgctttaattctgatggactaattcccagaatgtaagcaattttactaaaggagaaaatgtccccatttttataaaaggctaggggaagggtaagagagagtcacttgtcttcacacaggacatagagttggatctagtccaagggctgagccaagcactcagctctagatacaggtacaaatgctgctgattgggaagcgccacttaccaatcagcagggactccaaggggcaggcacctttggagcacatcattaagaacatgaaaaggcagggagaggtgggagggatagcattaggagatatacctaatgttaaataacgagttaatgggtgcagcacgccaacatggcacatgtatatatatgtaactaacctgcacgttgtgcacatgtaccctaaaacttaaagtataataaaaataaaaaataaaaaataaataaaaagaaattctacatatatacatttaaaaaaaaaaagaacatgaaaaggcaaaccgcagactgggacaaaatttatatttgcaacacatatgcctgaagggtctcagaaagattacaatgagccagggaagccagacacaaaggagtacattctatatgatggcattcctatgaagccctaaacacagcaaaactaacctatagtgacataaagcaagcctcagcctggtgctggggattggcaggggattgactgcaaaggggcacgaagagcattttggaagatattctatattttggttgcagttgtggtcacgcagggatttacatttgtcaaaactcatggaactgtactctgaaaatgggtgcattgttactgtatacaaattatgtctcaatgaagttttttaaaaggggacaagaaaaagagacaggaaggacaggatacgcatgttcaagacagcatgagctctgagctgttctttggaatagctgttcctgggaataggatttgtatgtcctgcatttgtgtgtcccgatatacactagactgtaagttccttaagggggcatccatgttatagtcatctctgtggccaccgcccccatggtacatgggccagattggtgctagatgaaatttgaataaatgtatgagtgaaactagagtaggcaaactcacccaggaacaatatgcaacatgaaaagaacagagcaaaaaagaaagaacccagggaaacacctattttttaatatttttcaatatttttcattttatttttaactatagaatatttcaatcatactgaaaacaatagagcaaacacctgtgtgttcaccaccaagattaagtagatttatatgtcttttcatgttttaaatgaaatgttataaaacccccagtgtgaaaggccaaagagtagagattttagaagaaatcagagaatgtctccatggccttgagagcatagagcaggattcttaaacaggacacaaaaacaccacaagaaagaaaaatatgatgaattagaagaagtaaattttgaataagtaattctgcttgtcaagtagcttaattaagagagtgcaaatatcccccccagagtgggagaagatattcataatttacgcatctgacaaaggactcatatccagaacatataaagaaccgctataaattagtaagaaaaagacagacaaccccaccgatagaaaaatgttcaaaagacgggaccaaagagttatccaaatgggcaatacacatgtgaaaatgagctctacgtcattagccactatgggacatgcaaattaaaaccacaaagatacataacagtccccatccagaaaagctaaaattcaaaagaaagaaaatagctagtgtcagtaagaactgccctgccttcctggagctactttgggaactgtctggagtatctactacagctgaacgtatgcataccctatgaacagcaacgccactgctgggtacacacaaagacacggagtgcataggtgattccccaagggccatgtacgagaaggctcagagcagctttgttcctaatagcctaaagcaatctcctcgtactgggcgtggacctcagcaatgatactctccaggtccaggtgccaattgttgtccagggagaggatgacggacatgtcatttgattccgacagtagttggttatactcctgcagacacgaagacaattctgcttacatctaatggacaggcccctaccacaaacccccaaagttagctttttagtgatgccactaaaaaacacgatgaccaagatgcaggccgaaatctcagccagcaggctaaagaatgaaaaggcgtctgtcttctaatcctactgcaggatgcatgcatctctttgtccaggtaccttggattggggaggagactctaagaatgttatccataggcactggcaatcatagatgtgggggacacagaaaagggggaagaaaaaagaaagggagttagaatatttgatagataaatagtttcaaaggtctcagaatctgagtagatggtgtggtaataaatgtgaaggaaaaaaagcaatgaatgaaaaaaaaaatagggcttaagagaatcactcatatcttaaacatatattgggaaggaagggggccttacagcctcagagaggggctgcaggaagttgatctcatccatcaggctctccactttcacctccaggtccactttggccacctggggagggagaacaccagaacagcaattggcatattttcatttgcttaaagcctgtactggtccataattacagcagaccagtgatgggcatattctcatttgcttaaagcctatacttgtccgtaatggttatgaagggaagtggaaaccacttttaccctggtcattaaacttaggttaagagtggcttgaggatggcgacagctccacgacgttgaggccgcattgggcagttcagactccgggtgatgacaggagagttggctgacaaaaaggaccatgatgcatcaccttccaaggaggaaaggaagcgatcatggactcctgacagagagcaagatagagaccagaactggaagtcttccccatctaaagataggaagcagcattattcaaggaacagacatcgaggaggcagccattcttgctttcgttctcgttccaaatctgcagaaaaagaacaacggcacgaagaacaagaatgagataaggagagggattggaataagaaggaccaatatcaagacaatgatgggcacagatgggacaaggaccagaaacgatccagtttctcctggccgaggaaaagactttaaatctcggaaggatggagactctaagaaggatgaagaggatgaacatggtgataagaagcctaaggcccagctgttatccctggaggaacttctggccaagaaaaaggctaaggaagaagctgaggttaagcccaagttcctctccaaagcagaacaagaggctgaagctctaaagcaacggcagcaggrggtggaagagcagcagaggatgcttgtagaggagaggaagaaaaggaaacagttccaagacttgggcaggaagatgttggaagattctcagtaatgggaacrtagggaacacagggagaggatggagccagagaccagtggaaatgaggatgagaaagggcagcagaagataygggaagagaaggataagagcaaagaactgcatgccattaaggagcattacctgggtggcatcaaaaagcggcaccaaacaagacatctcaatgaccgaaagtttgtttttgagggggatgcatctgaggasacatccattgactacaaccccctgtacaaagaacggcaccaggtgcagttgttagggcaaggtttcattacaggcattgacctcaagagcagtcaygtttctgtggagacctaatggaaaagaggcgaaccctgraagaaaaggagcaggaggaggcaagactcygcaaacttcataagaaggaagccaagtgcgctgggatgatcgtcattggtctcagaaaaagttagatgagatgacggacagggactggtggctcttccgtgagggctacagcatcaccaccaaaggtggcaagatccccaatcccatcygatcctggaaagagtcttyctgctgccacacatcttggaggtcattgataagtgtggctacaaggaatcaacacctatmcagcgtcaggcaattccctttgggctacagaatcgtgacatcattggtgtggctgagactggccgcagcaagacaacagccttcctcatcccactgctagtctagatcaccacacttcccaaaattgacaggatcgaagagtcagactaaggcccttatgccatcatcctggctcccacccatgagttggctcaacagattgaggaagagaccgtcaagtttgggaagctgctagatatccaactgtggctgtcattggtggcatctccagagaagactggggcttcaggctgctcatgggttgtgagattgtgatcgccacccctgggcatttgattgatgtgctggagaawcrctacctggtgctgagctgctgtacctacgtggttctggatgaggcagataggatgattgacgtgggcttcgagccagatgtccagaagatcctggagcacatgcctgtcagcaatcagaagccagacacgatgagtctgaggaccctgagaagatgctggccaactttgagtcaggaaaacgttaagtaccatcaaagtcatgttcatggccaccaagcccccagcagtggagtgtctggccaggagctatcttcggcgacctgctgtggtgtacmttgaccccgcaggcaagccccatgagcgtgtggaacaggtcttcctcatgtcagagtcagaaaagaggaaaaagctgctggaaatcttgaagcaaggctttgacccagccatcactatttttgtcaaccagaagaagggctgcgacgtgttggccaaatccctggagaagatggggtacaatgcctgtacactgcacggtggaaaaggccaggagcagcgagagtttgcattgtccaacctcaagcctggggccaaggatgtcttggtgactacagatgtggctggtcatggtattgacatccaagatgtgtctatggttgtcaactatgatatggccaaaaatattgacgattacatccaccgcattggccgcatgggacaagcaggcaagagtggggtggccatcaccttcctcacaaaagaggactctgcagttttctacgagctgaagcaagccatcctggaaagcccagtgtcttcctgtcccccmaaactagccaatcacccagatgcccagcataagccaggcaccatcctcaccaagaagcgccrgggagagaccatctttgcctgacacagcattcttcctgttcactgagggcatttccaaagctgcctcatgyctgttcttcagaaccctcacatccctttttccaggtcctcactcttgggttatggaggcttaggaaaacaatccgactccctagcccagaccctcaggtcgggaagcctscatgtggggctgcaaaaggagaagacgatgctgtaggaggcagggagagcaaattaccacagctttttggcccagctctgcccttctttgcttygggattgcactgggccataagctcatgccaggctatgggggcagccagttggcattgctccccagactgaacagaaacctggctgtctgatgggacctcctttggcacagacttgactgtgtaagtgtataaactgcagcagcatcgttgccctagatgccccaggagacctggcaccatgaggattatggacagtggaatcttactgtcatctggacagccgttttcctgtttggatggtaaaggaagttgagaacctttagacctgtgcacagccctgcaccaaggagtgctgtgtgctctaggcatcccttccccaggggattttctaagtagatggggggacagggtgaactgactgtgtccyttgtcactgaatgaaatctctgttttctattctctgagaagatgtttgtatgttctgagaataaatatatgaatatttttaaaaagtgacttgaaaatgagatgcaggaattaaagagagttcttacgtatgacactaatgcctcatcgcagcaggaaagtggcattatattccaaagagctcaaagcaatttggcaactgatgagcccttataagctctggaagccctcagacacaggagccaataaaaaagatggcagaatttctgcctttgaaagagatagatgagacaccagtgatggaggacctgtaagtgttcatgtgaccctggggcatgttctcccgggaagtctctcagtctcagggagagcctccatatctctctgtctcttcatcactttttgcccccatcacccaggaccctctggcactgatctaatcatgaaggaagcagagtgtgacatttgagaagtgaccaggctggcagcattgacaaagtcctggaacgttgggaagtctcataggcacgatgggaatttggctgacccctgaggagcactgttcaacctggctttggcagctgtagccccaatcccagtccccatccagcccccatccttgctcacctacttgagaagcaccaagtccttctcagctgctgcacgcttgctccgctcttcacagtacctgcaagaggaacagcgtgggtcagctgcagctgtaccagagggctgtactaggagaggtccctggccagtccagctcaggggtgagccaagcagaaatctctctgagtcatagggatccatgaagccctgagtcctcccagcccttctcagcactggcataaatgttcaggatgttggtgatggaggtaaaagcgtgagagcttgtcctcctccaagcccagctacactgcatggaatgcagtctccattctcccacctgctcctcatgctcccatatggctccccatctcccacactgaggcctgggcccctcccacagccctggagtctttcagtgttcctcagtcagcactgaagttaatgtcccttccagtcccacagggtgggaacccccagagagcacccctgagcttctctttcccrggcccctcactcagtccaggccctacaccacagccacgatgactgagggccccactcttctgcctctgccacactaatgcagtcagctaccccagccacagggccctatgggaacaaccggccccatgagctccacatgtacagctatagccccagcaccaagcacagggccagcacagagtagacatttaatacctttcattattatgtccttcgtagttcatgtcattcagtaataataaaaccagcattattaacaagctatttggttgatgagcctttcattagtattaactaattaattaataaggtgtcactatttgccaggcactgtttgaacagcatatattaaattatttagctgtcaaacaaacttttaaggtaggtacagttatcacccccgtgttacaaatgaagaaactgaggcacagattggttaaataaattacctatgattgtgcagttagaaagagacatagtcaagcttaaactcgggcagtctggctgcagagcttttgctcatacagacagtgctgcatggcaggtccaccaatgagccccgtcaagtgctttccttatccatattgccccrgctccttgttgatgcccacagaggccagatgaccttcackttctgggcacctgagcctcaccaccgggtgcactgcctctcacctcctcttgtatgcctccgcgagcgcctgcatggtgcccagctccccctccagccgaccccgctccatcagtagcttgtcaaggtgagcctggaggcagccaatgtaggattcaaagaagggctgcaggtcattggaggtggccatttgctcctacaggaagcatcacttggtctccagcaccttgttctgctgctccagcaaccgtacctgtgatcaaccatggaggagagggttatgctctgtccagtccctggctcaggagcagacctggtctccaaatccaggcctcccatgcctgggatcccagggggtctcagggcctctgaccctctccaacctcagacactcaccttgtcaatgaaagaggaaaatttgttgttgagggtcttgatctgttccttctcctgggtcttcacctcaatctaggcgtcagtccccatgttcaggggctaccagaggctctggttgatggtcacctcctggatgccaaagggaaaggcccccaaacctccaaagcctgaggctcctcaaggctgtcctccaaagccaccaggtctccctccaatgctgaaggagcttcctccaaagccacttttcattccccttccttcagccccacacagactgcttcccaaggtgccccagcacccctgtgccctgcccccagcacccctgtgccctgcccccagcacccctgccgcagcacccctgtgacctgcccccagcctgggcggcacctccagcaaccctcagtgagatctttctccctgcaaagctgtacagactcctgctgccaaaggtgccccctgtcacggcacaggccgcagcagcactgcctcccccagaacatgaggctgacggatctgatggcaccaccatggctctagccagacaccaggatggcagagtggccactcaagccctgggtggcctgggaggtcctgctggactgctggctcatcattttctctggatgcaggaagatgtcctggttcagaaaacctgaggaaagagcactttctgatgcaaggagagaggtggccctttttataagtcccagtggattggctcactaatttgacaatttcctgagcttgattttctagccaaaacaggtcaatgcctcaaatcccaaacacatcttggtcctaaccctggagccaccagttgctttgatttttctctgacattggcctcatttttccttcaccagatccaaggcagaaaaacacttaggctccctacaatggatgggctgcttcctactggaacctagccccaaacatcagggcatttgctgtaattaggtgattttccatgctcctcctgtctccggtgacctgagtcattaacttctgccagtcagatcccagctcttaaaacataaaatattcacaggagaccttgtctcagttaattgtgcagtgtggtcctgaaagaaagcccttcagctctcccgggaaccacatccactgcggtggggtcctcgggatgcaggggccatcaagagtctctaaggtaatgttttccctttttgtcctgaggaagtgactctccttacctctggacagtgcctagcctgcaagaacaggactctctgccctgcaggggctttacctgcaatcatctcatgcctgggtagttcagagtaaagcctaactcccgcccagaccatcaaatgaatgcactgtacgttctaggctgctcctctctgcagctcgtcgtcctggcatctccagctatcagcagagagggtagctcctctctgcagctggtcctccctcatctctccatcctctgtgtcctttcccctgctctggctgtgccctgggcttttatggacctcagaggggaggaagtgtgtgctgattggtccatgggctgccccaaggaggtaccacaagtccccactccagttggcgggattggccgaccgttccccagccttcaggccctccctgacctgaagttgcttatcagcttaaggagatttggggctgagacgatggggttttctagatatacaatcatgtcatctgcaagcagggacaatttgatttcctcttttcctaattgaataccctttatttctttctcctgcctgattgccctggccagaacttccaacactatgttgaatagtagtggtgagagagggcatccctcttgtgccagttttcaaagggaatgcttccagtttttgcccattcagtatgatattggctgtgggtttgtcataaacagctcttattattttgagatacatcccatcaatacctaatttattgagagattttagcatgaagcattgttgaattttgtcaaaggccttttctgcatctgttgagataatcaaaaccacaatgagataccatctcacaccagttagaatggtgatcattaaaaagtcaggaaacaacaggtgctggagaggatgtggagaaataggaacacttttacactgttggtgggactgtaaactagttcaaccattgtggaagtcagtgtggcgattcctcagggatctagaactagaaataccatttgacccagccatcccattactgggtatatactcaaaggattataaatcatgctgctataaagacacatgcacacgtatgtttattgtggcactattcacaatagcaaagacttggaaccaacccaaatgtccaacaatgatagactggattaagaaaatgtggcacatatacaccatggaatactatgcagccataaaaaatgatgagttcgtgtcctttgtagggacatggatgaaactggaaaccatcattctcagcaaactatcgcaaggacaaaaaaccaaacaccgcatgttctcactcattggtgggaattgaacagtgagaacacttggacacaggaaggggaacatcacacacaggggcctgtcgtcggggggtggggaggggggagggatagcattacgaggtatacccaatgtaaatgatgagttaatgggtgcagcacaccaacatggcacatggatacataagtaacaaacctgcacgttgtgcacatgtgccctaaaacttaaagtataatttttaaaaaattgtcatgactgggaaaggggtgctactgacataaataaataaaaacttgctttaaaaaaaaaagacaagactatagggacagagaacagatctgtggttgccagaggttaggggtgggggtagtgaacaactataaaaaatagcacgagggggttttgggaggtgatgaaattgtttacaccctgattgtgggagtgggtacataaatctatacatgtataactgtgttaaaattcatggaactggtggcagggcgcattgcctcatgcctgtaatcccagcactttgggaggctgggagagaatcactcaagcccaggagttcaagaccagtctaagcaacatagcaaaatcccatctttacaaaaaatacaaaacttagccaggcctggtggcgtgcacctatagttccagctactcaggaggctgaagcgggaggatcacctgagcccaggaggttaaagttgcagtgagccatgattctgccacaacaccctagcctgggcgattgagtgagaccttgtctcaaaagaaaaagtatatatgtaactatacacccaaaaagtccattttaatgtattaaaagctttttttttttttttgagacatagtctcactctgtagcccaggctggagtgcagtggcgcgatctgggctcactgcaagctccacctcctgggttcatgccattctcctgcctcaacttcctgagtagttgggactacaggcacctgccatcatgcccggctaattttttggtatttttagtagagatggagtttcaccatgttagccaggatggtctcgatctcctgacctcgtgatccaccagccttggcctcccaaagtgctgggattacaggcgtgagccaccgcgcctggcgacaaattcttttaaatatggacaaaggatggagaaacatgttaaacaatatcacactgtggggaggaaaaaatcactaacttaggatgctaactctacacacagatgaccaggtttcttcaacaaataaattacaagaaacaagaagaagaatgggaatccacacatatccaccaattacaatgtatgaacattgtttagaccctgatgcaagccagcaattttaatgaaaacattcctgagacatgaggggaaatgtgaaacctgactggatatttgatcatattaaataattaatgtttatcttgttaagggcgataaggttat

SEQ ID NO: 93462 - DNA, 13536 bp, Homo sapiens
tgttgaatctagttgtcaagtctcaaatccgtgactgtactcagtctttcattgtctcatgaccttggcatttttaaagagtactgggcaggttattttgtctaatgttcctcaatttaggtttttatctgatgttttctgttaagctagggttatagattttggggaagaatgctacagaggtaaagtgcccttctcatcacatcatataaggggttataagatatcagtctgacattattatttaggttaacttgatcacttggttaaggtggtatctccattgtgcagttgctatttttccctttccaaattctatgcattagaagtgagtcrctgagtccaggcaatactgaataagagagaaattgagctgtacttcccagagggagatgaatcaaagaatatgtgttctttctttctttatttatttagagacagggtctcactatatctcccaggctgttctcaaacccctggcctcaaatgatcctcctgtcttggcctcccacagtgctgggattataggcatgagccaatgcgcgagatctctttttacgtttattcaatttgttattcttcctttatccctttgaggatccaaggcatacttgtgttgaagccttttatttctgttgtttttttcttagattgagagtatctgtgaaaaaggtcttttaaagattgttcttttctttgcatttatctatagtgaattaccctcctaattatggaggattttactttgtttgtttttttggttggttttttttttttttttttttttggtgttggtgttggggaatttgtcctgtctacaattaattttaataagttgaggaaatttatttgcaggttcatcttagagtgggaagttttgcaatttcgttctgttttgttttgctataaccttctttctcactgctctcaccatccttatctagggtttttgtgaattcagtcatggccctgtatgtttggcacagatcctggttttgtggccatgtctatgttggcctggttcctgggtatgagagttacaaaagctgctgtcccaggcagcagagggcagcagcttgtttcagcctctttttctcacctcagcccctagttttatgaactaaaacagattccaagccactctgactggagcattttcctctattagattactttttttactttgaaaaaaatttttttttttttttggagagtgggtctcactctgttgcgcaggctggagtgcagtggtgcaattgtagctcactgcaacctccacctccccaggcttaggtgattctccacctcagcctcccaagtagctgggactacagatgcacgccaccatgcccagctaattttcgtatttttttgtataaacagggtttcatcatgttgctcagactagtctcgaactcctggcctcaagtgatccacccatctctacctcccaaagtgctatgattacaggtgtgaaccaccatgcccagccaaaaatgatgtttttaatagatacaaaaataaaataggtaagttctcataaaattactatatttaaacaataggggccaggcgcagtggctcacacctgtaatcccagcactttgggaggctgaggcaggcggatctttgaggtcaggagttcaaaaccagcctggccaacatggtgaaatcccatctctactaaaaacacaaaagaatagccaggcagggtgatgggcacctgtaatcccaactacttgggaggatgaggcaggagaattgcttgagcccgggaggcggaggttgcagtgagccgagatcgtgccattgcactccagcctggacaacagagcaagactctgtctcagaaagcaaacaaacaaacaaacaaaaaaccaacagggaaaaatttatgtctgcaattttatttcaataaataagcacacaagtaggtggtaagaatacacacacagagagggaacatcacaatatttattgcatttatttcttggaaatggtttttgattgttgttttgagacaggtctcactgcaaactgcacatcctgggctctaaaaaacctctaacctcagccccacccccaatagctgggactacaagtgcacaccaccacacctggctaattttttttttttttttagcgtgtaaccttttttttttttttttaatttatttattttttattgatcattcttgggtgtttctcacagagggggatttggcagggtcacaggacaatagtggagggaaggtcagcagataaacaagtgaacaaaggtctctggttttcctaggcagaggaccctgcggccttccgcagtgtttgtgtccctgggtacttgagattagggaatggtgatgactcttaacgagcatgctgccttcaagcatctgtttaacaaagcacatcttgcaccgcccttaatccatttaaccctgagtggacacagcacatgtttcagagagcacagggttgggggtaaggtcacagatcaacaggatcccaaggcagaagaatttttcttagtacagaacaaaatgaaaagtctcccatgtctacctcctactacacaaacacggcaaccatccgatttctcactcttttccccacctctccccactttctactccacaaaaccgccattgtcatcatggcccgttctcaatgagctgccgggcacacctcccagacggggaggtggccgggcagaggggctcctcacctcccagtaggggcggccgggcagaggcgccccccacctcccggacggggcggctggccgggcgaggggctgacccccccacctccctcccggaccgggcggctagccgggcagaggggctcctcacttcccagtaggggcagccgggcagaggcgcccctcacctcccggaaggggcggctggccgggcagggggctgacccccccgacctccctcccggacggggcggctggctgggtagagggctgacccccccacctccctcctggacggggcggctggcctggcggtgggtgacccccacctccttcctggacggggtggctgccgggcggtgacgctcctcacttctcagagggcgcggcttccgggcggaggggctcctcacttctcagacggggcggccgggcagagatgctcctcacctcccagacggggcggcggggcagaggcgctccccacatctcagacgatgggcggcctggcagagacgctcctcacttcctagatgggatggcggccgggaagaggcgctcctcacttcctagatgggatggtggccgggaagaggtgctcctcacttcctagatgggatggcggccgggcagagacgctcctcactttccagactgggcagccaggcagaggggctcctcacgtcccagatgatgggcggccaggcagagacgctcctcacttcccagacggggtggcggcagggcagaggctgcaatctcggcactttgggaggccaaggcaggcggctgggaggtggaggctgtagcgagctgagatcacgccactgcactccagcctgggcaacattgagcactgagtgaaccagactccgtctgcaatcccggcacctcgggaggccgaggctggcggatcactcgcggtcaggagctggagaccagcccggccaacacagcgaaaccccgtctccaccaaaaaaatacgaaaaccagtcaggcgtggcggcgcgtgcctgcaatcgcaggcactcggcaagccgaggcaggagaatcaggcagggaggctgcagtgagcggagatagcagcagcacagtccagcctcggctcggcatcagagggagaccgtggaaagagagggagagggagaccgtggggagagggggagggggagggagagggcagcgtgtaacctttgtaacttcacttcagcctccacacctggctaatttttgtatttttttgtagtaacagggtttcaccatgttgcctgggctggctgtaaactcccagcctcaagtgatctgcctgcctcggcctcccaaagtgctgggattacaggcatgagccaccaccagccggtaatggtctttaaagacatttctggacatttgtgatcagaggaaaaacgttgcctaattatctaataatttttttaaaatatttgttccattttgcaagccattttattttcctatcattagttgatacctatgtgtttgtttttatgccaagattgtgttgtatttgactcaaaaaatatgactgatggaagactcctcaacaaaattggtaggtaatatttgtgtacaatttttatatttatatatacccacattagtcatttcagaaatgtatgaaggcggtaggaagatagcatgagtaggatgaggtacattgtttttcttccaattagctatttctctcttattttttatttttgttttactttattttatttgagatggagtctcgctctgttgcccaggctggagtgcagtggcatgatctcggctcactgcaacctctacctcctgggttcaagcgattatcctgcctcagcctccctagtagctgggattataggcacctccaccacacccagctagtttttgtatttttagtagagacggagtttcaccatgttggccaggctggtctcaaactcatgacctcaagtgatccacctgcctcagtctcccaaagtgctggatttacagccaccttgtccagccaattttttaaaaataaatttcttggccaggcgcagtggctcacacctgtaatcccagcactttgggaggctgagatgggtggatcgcttgaggtcaggagttcgagaccagcctggccaacatggtgaaactccgtctctaccaaaaatacaaaaactagctgggcttggtggtggacgcctgtaatcccagctacttgggaggctgaggcaggagaatcgcttgaagctgagaggtggaggttgcagtgagctgagatcacaccattgcactccagctgggtgacaagagtgagactccatctcaaaaaataaataaataaataaataaataaattacttgatcttattaagtagaaaagttttgtctcttcctttattttcttattttattaaggttacagataaaagtaagactgtttaacaggcaggagcaacagaaaacaaggactcttgaaactttacaaactctatgatcaattaatgaatgattggaaattgtctgtactgagaatgatggctcgcacctgtagtcccaagtactctggaggctgaggcagaaggatcccttgagttgtgagtccagcctggacaacatagtgagaccctgtctctaaaaaaataaatgaaacagaaattgtctgtactgtacttaacacaaattctaccaacgtatgccaaattatgcataacatatagaaatagaatttctgctgtcaaagtagtagatgttctggataaaacatttcaggttctgaataaagaaaaaacatgagagtacaagggaaatgctaaaataaataccacttgagacttcaactggacccagatatttaatgtggtagtgctgaaaattatgggcctagcatggtgactcacgcctgtaatcccagcacttagggaggccgaagcatgtaaagcactttagctcaggagttcaagaccagcctgtgtaacatggtgaaaccccatctctacaaaaaatacaaaaattaggcgggcatggtggcctgcacctgtagtcccagctacttaggaagctgaggtgggaggatggcttgagcccaagaggcaaaggttgcagtgagctgagatcataccactacactccagcttgggccacagaccctgctctcaaaaaaaaaaaaaaaaaagatcccccgtcccaggcccgccggacccgcgctagcagcgtggcagcagcgtggcagcagcgcggcagcggcggcggcggcggcgggcggtccagcgggtgtttctctcgggtcgcagggtctcccagcagcgtggtggactacctgatcagcggtggtaccggctacatgcccgaggacgggctcatcgcgcagcagctcttcgccagcgcctaaggcctcacctaggacgccttcctgattctcccaggactcatagacttcatagctgaggtggaccttacctcagccctgacccggaagatcacgctgaagacaccgctgatctcctcccccatggacactgtgacagaggctgacgtggccatcgcgatggctctgatgggagatactggtttcattcaccacaactgcaccccagagctccaggccaaggagctacggaaggtcaagaagtttgaacagggcttcatcacggaccccacggtgctgagcccctcccacactgtaggtgatgtgctggaggccaagatgcggcatggcttctctggcatccccatcactgagacgggcaccatgggcagcaagctggtgggcatcgtcacctcccgagacatcaactttcttgctgagaaggaccacaccaccctcctcagtgaggtgatgacgccaaggctcgagctggtggtagctccagcatgtgtgacgttgaaagaggcaaatgagatcctgcagcgtagcaagaaagggaagctgcctatcatcaatgatcgcaatgagctggtggccattatcaccggcagcgacctgaagaagaaccaagactaccctctggcctccaaggattcccacaagcagctgctgtgcggggcagctgtgggcacccgtgaggatgacaaatatcgcctggacctgctcacccaggtgggcgtcgacatcatagtcttggactcgtcccaagggaacttggtgtatcagatcgccatggtgcattacatcaaacagaagtacccccacctccaggtgattggcaggaacgtggtgacagcagcccaggccaagaacctgattgacgctggtgtggacgggctgtgtgtgggcatgggctgcggctccatctgcgtcacccgggaagtgatggcttgtggtcagccccagggcactgctgtgtacaaggaggccaagtatgccyggcgctttggtgtgcccatcatagccaatggcrgcatccagaccatggggcacatagtcaaggccctggcccttggagtctccacagtgatgatgggctccctgctggccatcaccatggaggcccctggtgagtasttctcagacgaggtgcggctcaagaagtactggggcatgggctcactggatgccatggagaagagcagcagcagccagaaacgatacttcagcaagggggataaggtgaagatcgtgcagggtgtcttgggctccatccaggacaaagggtccattcagaagttcgtgccctacctcatagtgggcatccagcacggctgctaggatatcggggcccacagcctgtctgtccctcggtccatgatgtactcaggagagctcaagtttgagaagcggatcatgtcggcccagatcgagggtggcgtccatggtctgcacttttatgaaaagcggctgtactgaggacagcagtagaggccaaggtgatggagggggcacagcctccccccataactgagtggtccacagatttgcattacgggttccccagctcctttccagggagagaggaggggaggccctgaagggtctccgggccctcgctgggcatcccctgcagagtcagggctgctccctgggccaggctgccctgggagccccccgagcccagccagccaggttctcaggccctgcacctgcctcaggtctttcttgctgcagcctgctccagcccagcccccatcccaggggcaggcagcccctcctggtttctcctgtagggcacctccctgcccccagcccccccaggaaatggtgctctcctggccctgcctctggcccttcgtgggccgctgccccctcagccatgtagcacttctgagctcctgacctaggccaaggggaggtctctgccctcttccccggccctgggctacccttgggtcctgctcctcaggccactcccctgtccctggccctggggaggaggctgccctggtcatggccacctgcctgtcattcctgactcatcaccgtccccagtgaaccattcctgccctctcctcagctgcagttgaaggctttaactttgcacactttgggatcacagttgcatcattatgtgttaagtaattggaataaatcaagcaggtctcaatgccaaagaaagaaagagaaagaaggaaagaaagagagaaagaaagaaaagtagaaaagaaaagaaaagaaaaaattttgtagaccagagttcatgggtttcagctctggcttatctcttgtctggttgcatgacttgtcatttttggccttagttttctttaaaactataagtttaagacatgagctgtctctctatatctaccacttttttttttttttttttttgagacggagtctcactctgttgcacagactggagtgcattggctgaatctcaactcactgcaacctccgcctcccgaattcaagtgattctcctgcctcagcctcctgagtagctgggattacaggtgtccgccaccatgcctagctaatttttgtatttttagtagaggcctcaagtgatccacccgccttagtctcccaaagtgctgggattacaggtgtaagccacctcgcccggcctatatcttccacttttaataacctatgcccagaatctgaaaaatatttccacagtgggtgaagtaattacgattccatgcctcagaggcctctcacatccctacgtcatcggagagccgtttttgtgcgcttaccatctgtgttcatttgtgtcctatgtcctctgggtctctttccttgctatgttttattatggttgtatgaattaaaatccaaaatcctttttcctaacagaaatactttcctcctgagctcttacttgcccctttgctagcaagcgtggttaattagctccaacacatgaagggtagagtcaaacagggaattgtattaacatccgctttgtttgttccaggaaacctatgcaaataaacaagagaaaattctgttactaagcaagtataacacaattcagtttgcccaaagcactttatagtatttcttattgtttattcttcctggcaagaccaaggcaagagaaggtaacaggtgcagatccattaatgaccctctagcagcacattgcattgtgatgaaatggttataagaactgaattggaggaatggggttagagaagattggaactgttggggtttttatttgaggctacaaaatagtatagtttgagggccagacactgtggctcatgcctgtaatatcagaactttaggaggccgaggcatgcagatcacttgaggtcaggagttctagacaagcctggcaaacatggggaaaccctgcctctactgaaaatacaaaaattagggccaggagtggtggctcacgcctgtaatcctagcactttgggaggccgaggcaggcggatcacctgaggtcgggagttcgagaccatcctgaccaacatggagaaaccccatctctactaaaaatacaaaaacattagccaggcgaggtggtgggcacctgtaatcccagctactcaggaggctcaggcaggagaatcgcttgaactcaggaggcagaggttgcagtgagctgagattgcaccattgcacccagcctgggcaatgaagcgagactgtctcacaaaaaaaaaaaaaaaaaaaaaagaaaagaaaagaaaaatgaaagaaatttccaggctaggcatggtggctgatgcctgtaaccccagcactttgggaagccgaggtgggtggatgacctgaggtcaggagtttgagaccagcctggccaacacggtgaaaccctatctctaccaaaaatacaaaaattagccaggtgtggtggcgcaggcctgtagtcccagctacttgggaggctgaggcaggagaattgcttgaacccggaaggcagaggttgcagtgagctgagatcgtgccactgcaccccagcctgggtgggagaatgagactctgtctcaaaaagaaaaaaaagaaatttccagaacctcagaaggctccctgaggtcccctgccagttagtaatcccgcttaagggtaatgactgatttctcttaccatggatcagttgtgcctgttttcatacttcaaaaacatgaaattaggcatttactaattacatttaggaattactgctttggttggcctcagtgtctcatacctgtaataccagcactttgggaggccaaggtgggaggatcgcttaagcccaggagtttaagaccagcctgggcaaccaggcgagaccctgtctctacaaaagataaaaaataagctgggtgtggtggcacatgcatgccatgccactgcactccagcctgggcaacaaagcgagaacttgtccctcaaaaaataaaaataaaaaaaggaattactgctttgtgtttgacttttttggagacaggtctggatctcccaggctggagtgcagtggcatgatattggctctccacctgcaacctccaccttctgggctcaagctatcctcccacctcagcctgccaactcccaagtagctgggactacaggtacatgccaccccacccagctaatttttgtatgtttctatagagacaggattttcccatgttgcccatgctggtctcaaactcctgagttcaagcaatctacctgcctcagcctcccaaagtgctaggattacaggggtgagccccgtgcccagcagtgtgtttgatttttttttcttttcttttctttttttgaaacggaaactcattctgttgcccaggctggagtgcagtggctcgatctcggcttactgaagccttggtctcctgggttcaagcgattctcctgcctcagcctcctgagtagctgggactactggcgggcaccaccatgcccagctaatttgtgtatttttagtagagagggggtttcaccatgttggccaggctggtctcaaactcctgacctaaggtgatccacccgccttggcatcccaaagtgatgggattacaggtgtaagccaccacgcctggcctgatatcttttatgcaatattataaaattcattcacacagttttgtcaaggtgaaataaaatatatagatgaatctctaaaattaaaatgttttgtgaagcaggaattgtaattcagggcacacgcagactgggtggtctttgccatgtctgcagaacaaagagaaggttggaagttttgtaaaaaggaagtgttatgtattgctcttcaagaaagttcactggcactagtaaggttttggagagctggcaagttttgattggtaagtgaaggcaataagtaaaactatttctgagagtcacagtaggttgttttaacagctattagataaaactgctttcagattatagcacgcagtttcagcagtgaggctcactaagaatgccattcttggagtagttacatgccctgagtactttttcccccagccactctactactttattattgttatcattattattttattattttattttttacacagggtcttgctctgtcaccctggctggagtccagtggcatgatctcagctcactgcaacccagctactcaggaggctggtctcgaactcctgacctcaggtgattggcccaactcggcctcccagtgtgctgggattacaggcgtgagccaccgcacctggcctgcagtcttttaaaggcaattgtcaattaaatttccaaaatggactttcattctgttatttgaatagaaatggtgagctcttggccagccgtggtggctcatgcctgtaatcctagcactttgggaggccgaagtgggcggatcacctgaggtcaggattttgagaccagcctggccaacatggcgaaaccccatctctactgaaaatacaaaaattagtgggcaaccatcctggctaacatggtgaaaccccgtctctactaaaaatacaaaaattagtgggcaaccatcctggctaacatggtgaaaccccgtctctactaaaaatacaaaaaattagccaggcgtggtggcgggcgcctgtagtctcagctattcgggaagctgagccaggagaatggcgtgaacccaggaggcggagcctgcagtgagccgagatcgcaccactgcactccatcctgggcgacagagcgagactccgtctcaaaaaagaaaaaaaaaattagctgggcaacgtggcgagcacctgtaatctgagctactcaggaggctgaggtaggagaatcacttgaacccaagaggcagaggttgcagtgagccgagatcgtgccactgcactccagcctaggctacagagtgagactccatctcaaaaaaaaaaaaagaaaagaaatcgcgagctctgctataaggtacatttggggatggttcctaggttgtgaagatgaagtaaaggaactttgagaaagagactgcagcagtgcccagtgtgcccctcttggcactgacagcccaatctgagcctagagattctcaaaggattccagactcttgcccaggggctcttgggtcatccagagcattgcggggcaagacagaattagaacagactcaaaaaagaaagctgacccactcctgacccactcactatgtgcatatctctaaagggacaggcctgaccaaataagatggagctgcctttcgcaagacattaggggttagtggtagtgccgacktgggatggcaggagaccctgcttcaatctggtctttgattcggcttggaaaacaaatccwaatctccttgttgacagaacttgagatggtccaacagagctccttggaggtatgaggcctgaggcctgaagcctgaagkgaccagcaggtaactgggcaccacagcctgaggccaatcagccycaagcaagagcatcctgcttcctcagagggtttgtttgcttgaggaaagcgaaggctggcagtcatattccttcaggatcttccaaaaatgttggcaagggtgatcctgatgaagcccccttgtttggaggccaatgccagctctaactggactggcaagccaaaaatgaccactctctttcctgtagttcagaattcccgacctgccctaatggagacgcaacctgaatccaagagtgaggcaggcagctacagataagtttacagcgtgatgactacttcataaagcacaaaagaccatgtggtttagatggcaggtcatggaaatctaaagggaatggtgaagttgcaccgtaaggggaaggtgactgaggagctgaaactgactgaggggctgaagcatttcggacaggagaaaggatcaggaggagacagagcggagaatggagcctcagggctacccagcggtgggaagagggtagccagagactcgtagggcggcctgggttggttgtgctgggcaggttctcagtggtgggaaagtctggccacactgccctga

SEQ ID NO: 93463 - DNA, 14296 bp, Homo sapiens
gtggccacactatccatggaccagaccctgatcatctggcaagaatgtggatggagggtgccggctgctgagttctgtttttgtagtccccacagctgaccttttgatttcgggaggacgtcaaagccgagcgctgctgtgggatggagtgaggatcttcagctgatctggagggcaggaagcttctccatcatgtcaaggtaagccgagtagaaagaatgtgaatgggatcgcccgggtgacctgtcctcagctgagctgcgggaagcccgcagggatcttggtgctgagggctcctgatgtgtctgtcctgaatccttgctccaggccagaatcactgccctcggggtctggtgccagctctcatcttgacacctctcctctattttgctgagaatctcctgggaatgttgacttcttttgattttcctgtcctcctctccttcgatggatctgtttcctgtgaggaaacacttgaggagaaaggcttagcctcggatctgaattcttaatccacaggagggtcactgggtttatcttctcctatgcatcatcttcttgaacagggctggatgaagtaaaaactagcaaagtctggccgggcgcggtggctcacgcctgtaatcccagcactttgggaggctgaggctggcggatcacaaggtcaggagatcgagactatcctgattaacacggtgcaaccctgtctctactaaaaatccaaaaatttgaccgggtgtggtggcaggcacctatagtcccagctactcgggaggctgaggcaggagaatggcgtgaacctgggaggcggagcttgcagtgagccgagatcgtgcactgcactccagcctgggcaacagagcgagactccatctcagaaacaaaaacaaaaaacaaagaaactagcaaaatctgtgttcatccttgtgtgtggattgatatgtatgggttgggaggctggaggctggggtggacacgcagacccagagagccaaaacagcaagggccgtgagcacctgctgcaggccacttccctgttctttctggagcttcagttatttatgtgttggggatcctggacagttccctcattttctcttctcttctctttttcttttcttttctttttttttttttttttgagacagaatcttattctgtcacccaggctggagtgcagaggtgcaatcatagctcactgtagcctccaactcctgggctcaagcgatcttcccgcctcagcctcccaagtagctaggactacaggtacacgccaccaagcccagccaatttttaaattttttgtagaaatgggtctcactgtgttgtccaggctgatctcaaactcctggcctcatgattctcccatcttggcctcccaaagtgttgggattacaggcgtgagcccctggatctggccagctccctcattttttggttactccagtgtcgttttgtcattttactcttattttgtggcgattcactcaactttcatccttcagtcccttctcttgagtttttcagttttgctaacaagttcttaatttccaagaactcttttatatcttcctgtacttgtttcatgaatacaatatcttatctgaggatagtattttttttcttcatcccacgtaattccatttcctctaaggttgtttttttttttttgtttgtttgtttgtttgtttgtttgtttgtttttgccttggtcttggttttgcacattagaggttttaacttcaggtgtcaggtaatcactgggtgtcgactgatgaagcctgggaaatgtaaaagtccagatcaaatgggtgagagtgcggtcttttgagtcttttgagtttcactgtaggatggtctggctgggctgttcactggggaagcacagcagtgctctctttaggtcttcagagatttgccagattaccccaaggggcccttcctatgtgatgggaaggatcggcctggccgcatcttggagcccagtaggggaagaaggctaggactctttgcactcagcgttcagcatgacagcatatggtcacttcatccttttgttttcagtgtggcgcccattctctggatccatgctggcatcccctagttccaaacctcacttatactctctagagaataacctcctagcttcggccatgttgaggaaaaggctgtagctctgtagtttggaaactaggaatgggtttctcacccagcttttacccattccatacttaagcctcccctccaccccaacttccatggggtaacaacgccacagttctgtgtatttaaagattcttagcattttcttctgctggttttgggtgtggtattctcaggtctgctaaggaatttgccactggtctctctccttttcaacttctaaaatgattttgtggttgttgcccctctgctttccctgtatttctaaattaatgtccttttaaaagaaattcttttactatatttactgttttgtagtaggattttaatagaggagcaaaattaagtttatgtatcaatctgtgatttcttaaccccaaagtaaggtttttctttgctattattttactgtcatttattggagtcttgaatggcctaaaatgtataccttattccttctaacagcagcatccccttctaatttttgggtgtgttggccaggctttaattagagaggaagaaccagtgtatttcatatatatacaaatttgttaaaggaattggcttgcaagattgtgggtgctggctaagcaagtccagaatcagggaggtcatgggcacagaccacaactgttgtctatgggcagtcaggagggaagtgaatgagcagaatggaactccacaggcacaagtacagcagacgccactgcctgtgggtggaatttcttttctttttcagggaagcttcaacttttaaggcctttttaggcttctgcttttaaagcttttcaactgattgaatcgggctcacccagatctttcaggatactcttttttttttttttgagacggagtctcgctctgttgctcaggctggagtgcagagatttggctcactgcaagctctgcctcccaggttcatgccattctcctgcctcagcctcccaagtagctgggactacagacacctgccaccacgcccggctaattttttgtatttttcagtagagacgggtttcaccgtgttagccaggatggtctcggtctcctgacctcatgatccacccatttcagcctcccaaagtgctgggattacaggtgtgagccaccacacccggtccaggatactcttaatattcatcacatctgcaaaataccttcacagcagcacctagcttacataactagggactgtcactgagccaacttgacatgtacacacacacacacatacacacacatcatcacagtgggtttaccagtaaatttcttcactagtttcccataactgggcatttggattacattcttgttgttactgttatttgtgtttatagacttatttaacattatacttacagaagcttctgtggggagtttttagtttatagataaggayatcaggaccgtcaattacagtaaactgcctgagctgttctcttatgctgtgtaccattaagaataaaagaaaatttgtttttttctgaattgctgtcacagatgggatgtgctgtgaggaagcttaggaacatgtaagctactttaacatactctcacttaagtcatttaaagatgggcagaggtgctgagaactaagtaaatatgacaataagaagtgggaatggcagggccttagatgcccacctgcagactaaagtgctgtgtggggccaggctgtgccccgagcacatgtagggtgtgtggccggtatctgacacacatcttagaacacagagtggaacagaacagaatcaaaaagttgcttcaccttcagcaacaatacatgctggtgttgcttttccatagaaataaaaagtgataaatctaaaattacatgatattttgctgtaaataacagctcatttttattaaggttatctgctaataatagaatgaagataaaatacatttaacctttgtattttacaagttttaagtttttcttgatgcttggtaaccagtttttgcatttttgtgtttgagatatattaaatatttacttttgttaatatattgtataatttctaaatagttcctcttgttcttaaaaaccaatgtactttttcaaattgcatttttcataacaccctaaatacttattacttagtaaaaatactaaatatttttaagggctacaagatttggactcagcagttgattccaggaggctgctgcttgagggaatcttcatttgtgatgaacacaattgtttgtttaaaaccaaaaatctcaagagttgaatctgaaagatgtgtgtccatgtacatatccttgaagatcagaaggcaggttccttatttcaggttaaagcacagataattggcccttagaaatggaaccaatcaaaatgtctacaaatgcagaagaccatgagagggaatcctaccaggagaacatctttgggtcccctcaggctcctcactccagttaccccaacaattggagaagaaaggcccaggtattggggaacaatgccaaagcaatgcttgatcctggctggagccagttcttctgtcctgtaccactgggcttgattttcctgtgtggtgtaatagatggattatatggtactgtcaatgtcgttagtattaagaggttggagttaccacttataacccaactccctggtcagcaaaatcctgtgcaatatctacgctgcctgggaacggagctcaggatgacaagccaactgcagatgaagttgtgtcaatatccaaatgtgttcctgatgatacattcttctgtgctgttgttggatctgcagaagatcattgccaatgctgatcaggttcagagaggtttaaagccttcatgctgtctattcacaagtgggaactgactcagtctcttaatcacagctctgccgcacctgttgattaggtcagtgtgcagccttgggctgatctgtcataatggcatcattatgacatcattctagaacccaggtacagaactagctgagcagtcaagatggtggccgcacatgcccaggtgacaaaagccaacacagaccagtgtatggatgggacaactgtaatccctataggcagcagcagagatccagccattcctggctgcagtgaaagaggttaaaaaggctctcggaaagtttgacctgtgcccagatgccacctggtaccccacgaggattaaactgtcatccaagatgtttcgtagtcattccacagcagccagttggtggaacaagaaacgcacaacatcatgtgctgggcttaaagccctggaaaggagagcaggaactataatcacgatactttgtgcttgtcactgcatcagcctgcatggtcaggcatgtgggcatcccctaggggacacagtgccctcaagcttattagatagctagatatgacaactgaaccattctgtgggggatgaattcagggatgaaaaacagaggcccacagagggcatggtgcatgtccccacagtggggagccagcccgtctgtgggaactgctggcagaaaacattcctcttccaaaactgcgggcctcagatgacccccaggaccaggtggaggcctgacttcttgattgcatgaaggatctcgcaggccacacctccgagccgggttgacacaggtgaataaaggactggatgatttcagtgggtgggactgaaaacctctttggcttggaagatcgctctctggaaggatttggtgatcagaccttcctggggcattttttttttccaaaagtagaagggatataaaaagatttacactgagagcccctgtgcccggcccgcagtggcagtgtgcctgcggcaggtggccactcgggtgtttatgtcgggtcgcggggtgtcatgacagcctggcagactacctgatcagcagcggcaccagctacgtgcccgaggacgggctcaccgcgcagcagctcttcaccagcaccaacggcctcacctacaatgacttcctgattctcccaggattcatagacttcatagctgatgatgaggtggacctgacctcagccctgacccacaagggctgaagacgccgctgatctcctcccctrtggacactgacagaggctgacatggcaatcgggatggctctgatgggaggtattggtttcattcaccacaactgcaccccagagttcgaggccaatgaggtgckgaaggtcaagaagtttgaacagggcttcatcacggaccctgtggtgctgagccccttgcacaccgtgggtgatgtgcttggaggccaagatgctgcatggcttctctggtatccccctcactgagacgggcaccatgggcagcaagctggtgggcatcatcacctcccgagacgtcgactttcttgctaagaaggagcacgccaccttcatcagtgaggtgatgacgccaaggatggaactggtggtggctgacgttgaaaggtgtgacgttgaaagaggcaaatgagatcctgcagcgtarcaagaaagggaagctgcctatcgtcagtgatcgcgatgagctggtggccatcattgcccgcactgacctgaagaagaatcgagactaccctctggcctccaaggattcccacaaacagctgctgtgcagggcagctgtgggcacccgtgaggatgacgaatgccacctggacctgctcacccaggcgggtgtcaatgttgtagtcttggactcatcccaagggagctcggtgtatcagatcaccatggtgcattacatcaaacagaagtacccccacctccaggtgattggggggaacgtggtgacagcagcccaggccaagaacctgatggacgctcgtgtggacgggctgcatgtgggcatgggctacggctccatctgcattacccagaaagtgatggcctgcggttggccccagggcactgctgtgtacaaggtggccaagtatgcccagtgctttggtgtgcccatcatagtcgatggtggcatccagactgtggggcacgtggtcaaggccctggcccttggagcctccacagtgatgatgggctcctgctggccaccaccacggaggcacctggtgagtacttcttcttagaaagggtgcagctcaagaagtaccagggcatgggctcactggatgccatggagaagagcagcagcagccagaaacgatacttcagcaagggggataaggtgaagatcgcacagggtgtctcgggctccatccaggacaaagggtccattcagaagttcgtgccctacctcatagcgggcatccagcacagctgccaggatatcggggcccgcagcctgtctgtcctttggtccatgatgtactcaggggagctcaagtttgagaagcagaccatgtcggcccagatcaagggtggtrtccatggcctgcactcgtatgagaagcagctgtgatgaggacagcggtggaggctgaggtggtggagggggtgcaccccagtgtccaccttggggcacagtctccctccatcactgagtggtacacagatttgcactatgggttccccagctcctttccagggagagaagaggggaggtcctgaggggtctgcggccccttgcttggcatcccctgcagagtcaggactgcttcctgggccaggctgccctgggagccccccctgctcagctagctgggctctcaggccctgcacctgcctcaggtctttcttgctgcagcctgctgcagcctccttcagcctggcccccaccccaggggcaggcaacccctcctggcttcttctctagggcagcttcctgcccccagacccccaggaaatggtgctgtcctggccctgcctctggcccttccagggtcctgtcccctcagccatgtggcacttctgagctcctgacctaggccaaggggaggtctctgcccccttccccggccctgggctacccttgggtcctgctcctcaggctactcccctgttcctggccctggggaggaagctgccctggtcatggctacctgcctgtcattcctgactcaccaccgtcccgaggtgtaccattcctgccctcttcctcagctgcagttgaaggctttaactttgcactctttgggatcacagttgcgtcagtgtgtattaaataatcagaataaatcaagcaggtttcaatgcctccaaatatatatctatatctatatagatatatatatagatatcagtctcatgccactcttcatcccaaaaagtaacactatttttatgcatttctaaatccctactgctgctttctgcagataccagctaaatcaaatgtgaattcatgttccctccttcacacccagaaggtagcatacataaatgttcagtatcttaatttttttccacataacacagaaaacaggtgccgtgaccctactgcagtcactgctgtggtggcaaatggactcgttagaggaggggagtccgaaagtgcagaactgccaggcaaggagcctagaggcaggagaacgcaagtccatgtcagtagggggagggttcaaagtgcatcctggggagcctgcttccctggcaaaggtgctaccaaaatgctaaccagtcctcgagaaagacacagaagactgggagaggggtgtgtgtatatggggtgggggtgggggagccctggggctatgtgagctcttagcrgaagagttgcagcccctgtcctgggaatcacatgtagtgattcctgagtgtagaacagccattgtgtatcctggggtcacagggaacagagatcttctcccgaaactggacaaggaagagtgcctgtctgggctcacccccttgatgcttgtgtgatattttgagcttgaagtgttggatgagaccttgagacctgaagggaagggaggagcttggagggaggaacaccaagtatgtcaaacgtcctgggaagtgaagaaagaaatgtatattggccgccaccaagaagaatatggaagggagtttcccctgaggactaggagttgtcggtggtcctccagtacggtgggtggagatgctgccttcgggattcactatgggtgatgactggatgggaccagaaagataaaagggctggacctctgtggtcttgtgcagtgtgcaccaccgtgggaatgggctctaattgcaaaacacctgcaatgtgccagacattatactgggtgactttcctatgcttttatatgtttgcccagggttaaggtcctttattcttttttctttttttaatggtcagtatttcattgtggcattcttttattcaaattaaaattaaacttatttttatggagatcaacgtaattaactacatgtctaatataaagagcaataaaccttgttattttaaaaccacacaacattattttgatattttgagccaaacatgcaaaacttgacttaaaattgcatatttgatgcatttaagataaattctaaatgaaaatctaaatcatgcttttattgtaaatattaatataggcacatggaaaacatccaagcagtataagcaaggcatgaagtaaaaagtctgagtccatcgacagtgtaaagggtctgactattaccaccttaactgtgatcacacttcacttcagtaataattatagaccacccaaatgaaaatgagcagcagctacttattctcagtgtggtatatacacagagagtcagccacagtcacttgccattgcagacactcaaaggcagtcagcggagtgagaaagctttatgctgggaaaaggggaggcttcaggtgagccttgatcaaaggctgttggcatctggaggctgtgggtgagctaactagaagcagggtatcctatgtgattggttagggaagcatatttggccttctctggttggtcctactaaaggattttcaaaacagaggcaagaattagggaagctggcaggtactgatcaagtccgggccatttgggaccaaaggctacaggggttgtttggcttcctggactggttactgcagactgtgggtcagagttctgtttttgtatatgatctgcccatggtctgtatattctagtagatcccataatgaaaccaccagatatgagttacaacatgaagtaagtaagtacacagtgtcaactggaatgtgttcttgccaaaaatcctccacctgggtcttatcaaggctttaaatccaactgctggtttataggaagtttagggaatgaagacacaatcaggcaaatctaaaatgaaggatattctataagacaatgacctggtctcttcaatgctatggatttaaaaagggctggggaaggagggctggtgggaggactgttttagattgaaagaatgttgagacttgaataaccaaataaaataaacattgaaacaggcccagttttctcataaaactgaagcttgggccgggcgcggtggctcaagcctgtaattctagcactttaggaggccaaggtgggtggatcacctgaggtcaggagttcgagaccagcctggcccacatggcaaaaccccgcctctactgaaaatacaaaaattagccaggcgtggtggcatacacctgtaatcccagctacttgggaggctgaggcaggagaatcacttgaatctgggaggtggaggttgcagtgagccaagatggtgccacttcactccagcctgggtgaaagaatgaaactgttgtcttgaaaaaacaaagtgctcacttcagcagcacatattctaaaattggaacgatacagagaagattagcatggcccctgtaaggatgacactcaaattagtgaaggattccatattttaaaaaaaacaaaaaccttgaagcttggaaaacttacatttgtcttatctgagttcctttcttgggaaaccaaccatcgggcctcctgaatgataccgggaactgagactttccagatcactgccactggacagtgaggtgcacctgctccttgttgaccaacttcttatccctgcctcattcctgttttcccacatgtggttacaatgagatgctggaaccccttatactaccgcctgctgcctattgaccaactcctcgtccctgcccctcttcttttcccttaactttagttggtgggaagggacatatttgaggctggtctcccttctctctggctgacatcactcaaataaaatcttcttccctggcaatacttgttgccacagtgattggctttctgtgtggtgagcaacaggacctagaccaagcccctggtgatcagcaacaacatttgggaaacaattgagattttcatatggactcaattatatggtattggggaatcacttattgtgttagggtgttaatggcatcttgtaggggaatatgttgaggcaaggtaaactcaacactttaaagatgcagcatctgaagtaatttcctctgaaatggctcattaaaaaaatttataatgcagtatggcgaaatgtagtcttagatctaagtggtgagtacatgggttttcatgacagaaaaacagactagtctgtgtttgtactttttgtaatcatgtttagaggggagtctattgtgctctatcttaaattctacttagtaactactgttgcagtttaatgtctatacgagcaaaaaatagtcttgtattcccctttcatattttttcctaaacataattataatccacctactagattttttccctacccaatgccatggaaattttcctgtatcagaccatgtggatctgctgcattcttttttatggcaacacacatagtatttatttgggagaatgtactcacttattgagtattgataacttcattttttatagtctttccactgttaaaagcattatattactctagtctcaaagaaacagtgaaggaggcattgaaggaaataggctggttgtttgctgtaagagatagaacgtaggatgctgaccaggatggttgagaaggtggtcagcccagcccagagctggtaatcggaggggactagtgtctggagaagcagccaggtgtgctcatccctcaagggacacagcatggccaagggaggtgggagccagaggagaggggaaactgaccatgactaagagcctctccttaaactcagccagtttcagtgaaggtcatggtttctaaggtttagctgtgagacatcctcattaggttttttaaagggaaggcgagggttaaagaaagggagtcggcggctctacagcaatgcaggttctatgttcagcatgagacctgcagagatgggggaccagcttaatgccagtgctcaccactgcttacaggctggggcaattataaccctgggcaggagggatcttggggagcatgttgcctgggaaaaggttgataacatgttcccacgatgaggtggtttggcccttgttctggctgaatgtgatgttctttgtacttttttacagcagaatgtaagaaagtcaggtggttggtcaggctgtttctcatggcccaaacccccatggaatgtttcactttaaccaagatctgtgaaatgcaggggtatgggtggagggtgtttacagaatggtgcagtttggactaacagtccttagggcaggggcagctgcctttccagccaccttatgtctgcctgggcatgtggacccttggggttgtgtctgtgctgactggctaatgccatggctagaggcctgagatagccagcctggccaattccacctccagcagtctggcagggttgcagcagctgttagggaagggccagatagggggtgtgcatggaccacactgtgaacacatgcatgagtgactatggcccagtcagtgtcctgcagacaggcatctgttctgttaggacaatgacacaaatacttcaaatgtcatctcacaaggggccctatcatcccttaccctcatcccccagggcagttaggaaggggagatgacccatttccaaagtgggtaccgttgactgtgagagagttagacttcttaaacaaccttttaagggcttattttcaagatttttttttttttaaagaattcaaccagaagtgattgctagaaataggcaggtggcctggtggcatgggtgcattttccaaatgttttgtcaacaaagctgcagggtcctgctacttttgtgtgtagatcagagcccaaaccaggatctttgcttggaggagaacctccacaaaagcccctcttagctgtgtccctccgcaagatgagtgggcagccttgccctgcgagcttggacaaaactaaaactccaagctccccggagacagggtggttccgtgtgcattcctcctcggaggccagcttcctctggatttgttcttaggcttttgcagctgagggccactgcaaagaaaggttatccaaggagatgacatggcggcgagggctctagctggccctgtagatgagcctaaaaggcgagattagagcagctcagtgtgcgtccatgacctcagtggggatctgaaccatcatgaaaaccatcctatttgtgggcaagaatgtctgttcttgtttgggatcagtgggtcagcagcaacaccctatggaagcagcagaagcaatggcagcttacaattgtggctggttcttaactctcgccaagagaatggagaggtttggcctttccccggggaaacaggactgagccacctctagcgattcttgggacaactcaaggggactagggtattcccaggagagacactgggcctgctactaatctggaaagaaggccgagagtgaatttaaatgaaatagaaaatgcattatcaccctgaacacaaaaagcagctcctctgcccacacagaggtaggatacaggcgatcagattccccacgttcctgaggctgtcctttggaggacagatcacaggttgagttacaaaacacatcctacagcaaatcctgacggcaaatccagagacattttaggaggacagtgtcactggcttcaaatatctgtgtgggcggaggattacctaggtgctgaggcaagagactgaaggcacaaactgtttcagtataataaagaaaatagttagaataagaatagtcataatacaaattagatacagagatgatcatgaacaattatcaatcattattatcaacattaatcattagcttttaatattactctttgttgcattactaat

SEQ ID NO: 93464 - DNA, 12875 bp, Homo sapiens
cttcttgtcctggtgcagtggctcacgcctgtattcctataactttgggaggctgaggtggctggatcacttgaggtcaggagttcgagaccagcctggccaacatagtgaaacctcatctctactaaaaatacaaaaattaaccaggcatggtggtatgtgccagtagtcccagccactcaggaggctgaggcaggagaattgcttgaaccccagaggcaaggctgcagtgacctgagatcgcactactgcactccagcctgggcaacagagtgagactctgtctcaaaaaaaaagaaagaaagaaaaaagaaaagaaagaaatctacttgttattatcttctcaagggctttattcttacatcataaatgttatacttcctctaaaataatttctatcaacataaacgtgctgtaatatattttacctttaaaaaaccctaatggatttgatgttttctgctcttcagaaagtagtccatacattctacctttacctttttcctcctgttaactccaaacacactctaatcaggaatcccttccactctacactgaatccacttaccaaagttaccaacaagcctcatgaaccaaatccagtcatcagttcccagtctttatgttatttaacttagaagcagcattaccagagtgcattattcctgctttgatatgcttcctttttttttttcgtttttcaatgccttgtcagttaggcaaaagattctaagttcataggggcatcatttcatagttgctttacatgtaaatttccatagggaaagatctttctcaaaaaaattattaacgtgtgttgtgggaagttagggaccccaaacggagggaccggctgaagccacggcagaagaacgtggattgtgaagattttatggacatttattagttccccaaattaatacttttataatttcttatgcctgtctttactgcagtctctaaacataaattgtaaagatttcatggacacttatcacttccccaatcaatacccttgtgatttcctatgcctgtctttactttaatctcttaatcctgtcagctgaggaggatgtatgtcgcctcaggaccctgtaataattgcattaactgcacaaattgtacagcatgtgtgttcgaacaatatgaaatgtgggcaccttgaaaaaagaacaggataacagcaattgttcagggaataagagagataaccttaaactctgaccgccggtgagccaggtggaacagagccatattttctcttctttcaaaagcaaatgggagaaatatcgctgaattctttttctcagcatggaacatccctgagaaagagaatatgcgcctggaggtataggcttataaacagcccccccaggtgcgcctgtctcttgtggtcgaaactgcagaaatgaaatagactccagtctcccatagtgctcccgggcttattaggaagaggaaattcccgcctaataaatttagtcagaccggttgatctcagaaccctgtttcctgataagatgttatcaatgacaatggtgcctgaaacttcattagcaattttaatttcgcctcagtcctgtggtcctgtgatctcgccctgcctccacttgccttgtgatattctattaccctgttaagtacttgatgtctgtcacccacacctattcgcacactccctccccttttgaaaatccctaataaaaacttgctggtttttgtggcttgtggggcatcacggaacgtaccgacatgtggtatctcccttggacgcccagctttaaaatttctctcttttgtactctgtccctttatttctcaagccagccgacgcttaggaaaaatagaaaagaacttctgtgaatatcggggcagattccccgatagacttggctttttttctgagtaagcagtgatatccaatctgtttttggggaaataaacaaactttaagagagttggggctgggcatggtgactcacttctgtaatctcagcactttgggaagccgaggcgggaggatcacttgaggtcaggagttcgtgatcagcctggccagcacggtgaaaccctgccactactaaaaataaaaattagccaggcatggttgtgcacacctgtaatcccagctactcaggaggctgaggcacaagaattgcttgaacccgggaagcggagatgacagtgagctgagatcatgccactgcactccagcctgagggacagcgagactctgtctcaaaaaaaaaaaaaaaaaattaagagagtggtactgagaaaagtaccaccagcatgcatttatttatttatttatttatttatttatttatttatttagaaggagtcttgctctgttgcccaggctggagtgcagtggagcgatcttggctcactgcaacctctacctcctgggttcaagtgattcttctgcctcagcctcctgagtcactgggactacaggcatgcaccaccacacccagctaatctttgtatttttagtagagacagggttttgccatgttggtcaggcttgtcttgaactcctggcctcaagttatccatctgcctcgacctcccaaagtgttgggattacaggcaagagccaccccagctggcccatttaagtctttaatccatgttaagacggtttttatatatggtgtgagaaaggggcttttctagttcttttacatgcattactaagttatcggctggaagttttctaatttttggatgtaggtgcttatggctatgcattgacctcttagtattgctttcactgtattccataggttttcatatgttgtagttccattttcatttgtttcaagaaatttttaaattttcttcttaatttcttcatcgacccactggtcattcaggagcatattgtttaatttctgtgtatttgtagagtttccaaaattcctcttgttttattccattgtagtcagggaagatacttgacrttatttcaagtttttttaatttttaaagacccattttgtggcttaacgtacggtctttcctttagagtgatctacctgctgagaagaatgtgtattctgcaagtattggatgaaatgatctataaatatctattatatcccgtattagtaagggttctctagagaaacagaactaataggatatatatatatgagtatatatgagtttattaagtgtttttttgttgttgttgttttttttttgagtcttgctctattgcccaggctgcagtgcagtggcacattcttggctcactgcaaccactaccttccaagttcaagccattctcctgcctcagcctctcgagtagccgagattacaggcatgcaccaccacacccagctaatttttgtatttttagtagagacagggtttcaccacgttggccaggctgctcttgagctcccgacctcaagtaatctgcctgcctcggcctcccaaagtgctgggattataggcgtgagccactgcgcccggcctattaaatattaacttacacaatcacaaggtcccacaataggttgtctgcaagcttgaggagcaaggagggccagtccaagtcccaaaactgaagaacttggagtccgatattcaagggcaggaagcatccrgcacgggagaaagatgtaggctgagaggctaggccagtcttatcttttcacgtttttatgcctgctttatattcagtggaagctgattagatgatgcccaacagattaaggcaggtctgccttcctcagctcactgactcaaaggttaatctctttcggcaacacccacacagacaggcccagaattaatactctgtatctttcaatccaatcaagttgacattcagtattaaccatcacaggtccatttggtttatagtgcagattaagtctgatgtttcttcgctgattttctggctagattatctgttcaatgctcaaagtggaatgttgaagtctccagctattattgcattggggtatacctctctttagctctaataatatttgctttatatatctggatgctcccgtgttgagtgcatatatttttataattcttatatcctgtggctaagttgacccctttgttattatataatgactttctttttttttttaatagttttttgttttcacatgtattttgtctaagtatagctacccctgctctttcttgatttctgtttgcgtggaatatttttttccaactctttattttcagtctatgtatgtctttataggtagggagtgtttcttgtaggccacagattattattctttaaatccattcagccactctatgccttttaattggagagtttattccatttatattcaatgttattattgataattaaggacccctgccatttttttttttttttttttttttactgtttcatggccttttcttcctttgttcttttcttcctgtcttcactttagtgaagatgattttctcagtaggtttgttttaatttcttgccttttatattctgtgtgttttgttttgttttgtttttttgatttgaggttatcatgaggcttgcagataatatcctataactcattatattaaagtgaagaaaacctagcactgattatataaacaaacaactagcaaacactcaaagagaaaactaataaaaactctacactttaaaaatatggactacttcacataattgcatgttattctttgacaggggtcatggtaatcatctctgtatgattctacttttattatatgtggtgccaacataaacactcaattatttatgtaagtaaattaaattctccaatcaaaagacctagggtggctgaatggattaaatagcaatttacaacaatataattcctgcaagagactcactttagcctcaaggaaaaacatagcctgaaagtgaagggatggcataagatattccatgcaaatgacaaccaaaagagagcagaagtggctgtacttaacagtagacaaaatagactttcagtcaaaacagatgaagaaagtcactataaaaagaggtcaattaatcaagagcatataactattgtaaatatataagcatccaacttcagagcacctacatacataaatcaaatattaacagaacttaagggagaagtagatagcaatacaatagtagaagacttcagtaccccgctgtcaacaatggataagttattcactcagaaaatcagcaaggaaacagcagacttgaataccacaatagatcaaatgtcctaactgataaatacaaaacattacttccaatagcagcagagtaaacattcttctcaagcttacatggaayattctccaggatagataatatgttaggccacaaaacaagtcttaacaaatttaggaagattgaaatcatatcaagtatcttttccaaccacaatgttatgaaactaaaaatcaataacaggaggaactttggaaaattaaaacatatgtggaaattaaacatactcctcaataaccaaattactttttctggtcagagaagaaatcaaaagacaatgaaaatggactcacaacacatcaaaacttatggagtgcagcaaaaagcttcattccctatgggggaaatttacagtgataaatgcctacatcatgaaaaagaaaggtagaaagaaagaaagaaaggagcaaccttactttatacctcaagaaactagaaaaatagagaaaatatgaatctaaaattgacaagaagaaggaagtaaaaattagagcagaaataaatgaaatagagattagaaaaacaatttagtctccagaaacactcgggctggtggcagtgagggtgttaattataatttggatataaaaccattttcctagcccaccttagagaagactgttgccacgctagttgaaatggttccaatagcctcccttgcaagtcacttcagagtcaaagaattttctttgtaaaaacagcaagggaggtgtcacagtattccatttagagcgacaactttaagttcttgccatggaaaattcagagaagacagaagtggctctctktgcttgtggttcctttaattctatcaccaacaagcacctcaggttgtttgagctggccaaggattrcatgaatggaacaggaagatatagagttgtcaaaggcataatctctcctgttggcgatgcatacaagaagaaaggactcattcctgcccatcaccaggtcatcacggcagaacttgccacccaaaattccaaatgggtagaagttgayacatgggaaagtcttcagaaggagtggatagagactgttaaggtgctaaggcaccatcaagagaaacygaaggccagtaactgtgatcaccagcagaactcacctacattaggaaggcctggacgaaagaggaagtggactgaacaaagacaagattctgatcaagaggaatcccctagagccaaaaatgaaaggtgcgccaaaggtccatctgctgtgygggggtagatttactggagtctttggtgttctcagtttgtggatgagtgaagatatcatccaaatcgtggcagattatgagctcatatgtattacttgatatatattatcatggaaaattcagattaaattggaaatgatgctcagaaattcatctatgaatctgatgtgttgttgaaacatcagagcaacattcacatggtgaatgaatggatgactattgagatctcattsacaaaaatctggagagtcctcagaagggatcagagcatttgctagttggcaccagatcttgtccaataataccttgaaaagcagaatttgtacagctccgagagtgaaaacaggaatgttgggatcatcctgcccctttgcagagaaacactgcagaagctaaggcataggaattctacagcatgatgttttggacttcccttttggggatttgaaacaatctgggtgttagtaacgggggaaagaaattgtgatcctgttgcataaaataaagcttaaaagtttagtaaaaatcagtggtaagttaaaatcaggatttatttttattagaagttgctaagatgaatgttttccatatgttttggtttttttagaatgtacaaatctctttatctttaaaccaagagattagcagcacactaaaaccagaagaattttcagtgaaactagccacaaataagtaaaaaagtacattcaactctaccacataaaagaaacagagtgtgaaaagcaaaagttcatttaaaattctaactttggttatgaaggaaattgacattgtatggatgcctgttgctggataatcaggagccagggtagacaaaggaaggaactcttacagtggtgatcttgtaaagtgcaccattgataaatcgtctccagttacgcaaaacaatgattgtgaatttgcctggcagaaacattgcaccaatagttggttttctgtttcacacatcagaatggccaaataaactttggcgagacttatctgcctagagctgcacctttggaggtagggagtgaggtccaagcccgtgtatgtttagaaaggtgtgcaggtatttctgatgcccaccagaggtagagagctgctgctttacaggttacacacattcatttagccttttgcaaatcatattctagccctggccatctgccacctctttatcttcaggaacaacttcagagataacatcatgctgctttgaaatgagaaaaccaaagataatgaggggtctcattcaaggaatttataagtctgaatgttctcagcctttactgatagcttaatcaaaagatctgagtggggcacagtggcacatgctctgtaatcccatctacttgcgatgctgtggcaggagggtcgcttgaacccaggactttgagaccagcttgggacaaacaaggagagctcatcttaaaaaaaaaactctggagtttctgaaaagccctgctctttctctgttccagcccactgtgaatctgccatttgtgaatttaagcagaaagggggtctgttttcttatacttttcctcttcttgtccttttatatgaagtttagctaaaagtagtactctcaaataactagtcatagctttatgataaaaactggttaaaattttgtagaagttctaccaactggtaaaatgaaagactagaaatagctttttgtaaaatagttttagggtttgtgaaaatagttctgtgatagaaacaggactaaaattaaatttctaatgaaaatagaataatttgcttttttaaatttctatttcatacctataccaccccagatgaaggatttgaactgcagaataaaaaacatacatagaattgtgtaattgcgtagttggacctgaatctacagtttaaaaaaggaaaatgttaaataaggttaagcaaatgtttatcctacagctcccagcttattcttactaaagccatcgggccaactctcaaagacagggtaggcgaaaagcctcacacctagcrgttgcattatccatctgccgagtgaatgaaatattggaatctcaaatcctagagatgcgagtcatttttctactccttggctttttggagcttaagagttgaagcagcactgaaaaataacaattgagcaagatgaagctatcataactgagctttagtttcttctgggcaacttctagttcatctgaaacttctctcatactgtcatgccttcctacttagaagtgcccgggccctgctgacctgtgatactattgacctcagaacctcactggatgaggcacgtgcaggaggcctggtaatggagcaacaactttatacaaagaacaagttacttgtttttttccccaagttctgagggtgctgctgatgctgccacataatggtataattttgggtgtcctcctgaacagaacttcccctttgaaaatggaaataagaacaatgaacttcacaagagaatgaatattaataactgttgtgactttctttaaggaagaagaaaatacaccatggcttattccctacttcattatctatgtaatttgcttttgtaatgtgaatttagaggaaatgtgtgatgctcctattgtgttttgtttgtttgtttaatgctgggggctttatttgttgtatactttactctgtatattgtgtaattcaaatgcaacaaacaaacatgcaggaaaagtcctttactggcatcttcaaaagcaatttagaaatcaacaaaactgagttggtttcttttaaaattaacaacattatcaaacctttagctagactaaccaagaaagaagagagaagcctcgaataaatgaaaccgaaaatgaaagagaagatgatacaactgatacctcaaaaacacaaaggattgtaagtgactattgtgaacaattatactcctaatttctagagagcaaagtagcaattatgtctttattaactaggactaaatgttcaattaccccatatggtaatatacttgaaagaaggatcattgtgtgttaattgttcttggccagaatatcaggtgatggagaatagtcatatcatcttaagagagttgacggcagtaagaaaaacatattaaccaattttattaattaatataacattataatttttgattttactaccatttatagtttcaatggctgtcattttaaaatgtttttatctctacacctgaggcagcgtatgtattttggaaagcagaataccatgcttagaagttaataatgcaaaattagtcacttattagctcagtgacatctgatgagtcaattaacctcattgtgcctcggttttctcatgcataaagggaaaaataataatagtggctttatcttatggagataatgtaatgttttatggagttaacaccaataaaaatcttagaagtgtgcctggcatatagtaaatgttacatatacattagttctaattatttgtagagagaacgttagtcttctggtcttagctctgttactctctgattatctgtaatcttgggcaatatattctgatctctgagcagcctccattttcttctgtaatatgtgcataatatttctttatgatgttttaatgagaagacagatacaaaactatacatagtctgggcacggtggcttacacctgtaatcccagcactttgggaggccgaggagggcggatcacgaggtcaggagattgaggccatcctggctaacacggtgaaaccccgtcactattaaaaaatacaaaaaaaaaaattagccgggcgtggtggcgggcacctgtagtcccagctactcgggaggctgaggcaggagaatggcgtgaacccgggaggcacagtttgcagtgagccgagatcgtgccactgcactccagcctgggcgacagagtgagactgcatctcaaaacaaaaacaacaaaaaactatacataaaaagttccacatcacttaaaaatttatttattgcatagtataaaaagaatatgtggtctctggttccatccatgttgtttcatatgactggatctcattcttttttatggctgaatagtactccattgtgtatatgtaacacattttctttatccagtcatttgttgatggacacataggttgcttccaaatcttgactattgtaaacagtgctacaacaaacctaagagtgcagttatctctgatataccgatactgatttcctttcttttgagtatatatatatacccagcagtgggattgctggatcatatttatgttaagtgaaataagtcaggcacagaaaggcaaacacttcatgttctcacttacatgtaggagctaaaaatcaaaacaattgaactcatggacatagaaagtggaaggatgattatcagaggctgggaaaggtagtgagggtatgggggaggtggaaatggttaatgaataaaacaaaaatagaaagaatgaataagacctagtatttgatagtacaacagggtgactatagtcagtaataacttaattgtatgtttctaagagtgtaattgtattgtttgtaactcaaaggataaatgcttgaggggatggctaccccattctccatgccgtgctgatttcacattgcatacctgtatcaaaacatctcatgtaccccataaatatatacacatctactatgtatctacaaaaattaaaaaaaaattaaaaaggatgtgtgaaaattatggagaagaaaacaaaaagaaccatctaacatatagagaacagaccaaatatgatatagtcttgattgataatttgagatagttttgttccattctaccaaccattttttgcttccttgtttctttcctctcttccttctgccatccctctcttctttctctccttcctcttttcttcctcagtatattcaataatttatcacacatacgctgagaaactatactctaacaggcccaatgctaactacaaaagcattctccacccttgggagagttcaggcagagagtaaagaaccaggcacaccgaacatccatggatgaatgggtaacacagctaatttaatcttcagatttgaagttccacaaattagtgacctcaggataatttgtgtggcttttaaaaaaatacaaatttctagaccccacttcttgattctaccaataggaattttgaaaatgagggaagggaattgcagagagaagtggtctatattttctaacatttcaccaaagaattctgatgcagcaggtccacagacattggccagtttgaaaatttattgaaatatcttatagttcgttccaatataggtatataattaatcatttttaaaagataattttacataaaccaaaaaatattgtcattgttgctttcttaatttcagcatgtgggttttgtgatataggtccctttcatgattttccaaatacaatgtcatcactcaaaatgtatcaatactaatcacaatagtagacaaagaaacacattccaacatcttctatacatagatctagaatttttgtccagtgatatcaatcaccttgttccacaaatctaaatttgagataaatcctcttttttcgcttaggtggttttgtttcattgttattccacatctgaattaatccaagctgttgataacaaaggaaagaggtgaagaaatataagttgattagcctaaacccattcctactgtgaaaaagagcatgtagccagcctgtgagcaatggtgagtaacatcatcattactaacaaatatgagccatttttaggtattctaatctcgggcttcaaagtctaaaacattaaaaaataaaagaataaaacctttttgtttaaacaaatgctggttttctaatggcacaaaggtcaatcatttgcttatgtctagtaaaaatgaggattacatrttatctcttttagaactagaaaacaagattatattagaatgcagattgttggaaatgaggcatttttgatgtatgtatctgtttaattctctcattcaacatatgtctaacctgtgtgatttttctgttaaataatatctaggccaactagaaatctacacaatatttctagtcatgattattttctatgggtttcagagcaagtaccaaaaatgtacaaatatctaaaatttatttttcatttcttgaatgctaaagcatgtgagcatcttggtctattatatttagtcaagaatatctttccactatttctgcattaaacattaatgagtagattcctttggaaatttggcatttcgtcctgaactagaattagaaaaagttttctcttcaaacaactggaaacagcatgtgttctgtttattgcttcacatcaaagccagccttataattcctttctgattttgtctggataagttcaaattagctact

SEQ ID NO: 93465 - DNA, 28874 bp, Homo sapiens
catatgccagggtacttgttaggatcttttcactgcaaaaaaaaaaaaaaaaaaaatgcccgtattcaaatagtttgaagagtgaggaaatttattctcccatccaattggaagtcaagaagaggaatggtcttctaggtcagttgttaaagccgcccagtgccattttcaaggacgtagattctttctctctctctgcctttcctttctcggcagaccggctggccctcgggctgacactcttgtggctccagaatgattgccaaaggtcaaggcctcccgtgcagacatatcaccatccagacaaaacaggggccatcttgtgtggaatctctcagatatgaacaataatagaaaaccaagccctaactacgtgccagctgcattatgtatataatcctctcagcaactctatatggtcattataatgatcgtctccattttctgaaaaacaaaggcacaaaaagctaggcagtttgcattcatcactgagtagtgaaattggaattcaaatccaggcagtctggtggtgatatggtttggatctatgtccccaccaaatctcatattgaattgtaatccccattgttggaggtggggcctggtgggaggtgattggatcatgagggcagagttcttatgaatgggttagcaccatcccttcggtgctgttcttgtgatagtgagtgagttattgtgagatctggttgtataaaagtgtgtgacacctcccccttctcagtcctgctccctctttgccttccaccatgagtaaaagctctctgagccgtccccaaaagcagatgcttccatgcttcctgcataaccagtggactgtgagccaattcaacttctttatgaattacccagtctcaggtgtttctttgtagcagtgcaagaatgaacaggtggcaaggcctcttgctgaagcccccacaccacactgcctctcacataggcggttctgcccttagagtcatggagattccaagaatattggggtcccactataaagtatgttcaatgaatgatggtgatgcaatgagttagctctttaaggagatagacaaagtgctatctcctacgataagacagtaggaatgaagtgggaggtcctacactgttgccctccatcaggcatcttttaacaagcacaacacaagcatttgccatgctgctgtggtcagtgatgatcttgtgatcttgggctttctggggttgacaccacactgtccagtttctacgtgacttttcactcagaacaacactgtgattcacatttggcctcatgcttccttggtcttgagaacagaattttatctgtaaggctggatttatttgacatctttagtagaaaataacaaaaacaaatgccaactagcttatgacaaaagggaaatctattaaaatgacaaaaaaactcaagggcaagcatgtagccagacctcagaaatcactgaatcctggaatgaaaacccatggaaaatccaagtgagactatcttttgactctgctttttttcatgtgtccacttcattcctcattttgcagaccagttctcttctcctgacagcttgctgggatatggccaccagtatacagtgtaaaaatgtacctgttacacagccattcctagagaattaatttccattcccatttcctacccatcccagccccctaccctctttctttctttctctttctttctttctttctttctttctttttctttctttctctctctctctttcttctttctttctctctttctttccttccctttctctctttcttttttttctttctttctctttctcttctttctttctttctttctttttctttctttctttcttccttccttccttcctttcatctctctctctttttctctctcatttccttcatttccccattttctctaaacttctggataagggtttgtgattaacttatcttaggtcggaggcctatccttgatcaaatcacccatggccagaagaatagggtcatgttctacaaacatagtgctaggtttttgtttctgtggatgagagaaaggggacccacgcaagaaattgaagatattcctgtgtactgtggagctattcttaaaggtgacatgggatcagaataatatgggaatggaaagatatttttactattaaaactttacaacacatgcaaaaagagacattaatataatgaaccacacacacaatcacccagtatcagacataacacttcaatacgtatctctaaaagttatattcacaaaagcataatgccattgctacacgcactatctaatatcaaatcaatacttaaatttcccccagcactaaatttttggtatttggttttttcaagccaagatccaaacaagatgtcatctagcattggtttcatgctgcataacaatctttttaacctagagcagttctcacccaactatctgactcagtttttacaacctatgaagacaccacattatttgttctactgaatgtcccatacactggattccaagagcttaaagcttttctccaaggagctaggacaaagggctacatctatatttgggcaaggttgatcttttactggataatataaattcaacgtattttgatcaaccacaatcattattcctttgatacttaaatttttccatattgggtcttatgtcctttgacatgactcagtcttcactgacacacttatatgtccctggcatgaattcagccatttctctaaaaagttcttgcttcttttataggagaagtggtatttagagaccatagccttatccctaggtgtgctcattgctaccaagttttcattgttttagctagggattggcaaactacagcccatagtgctgcttttacactacaatggcagagatgaatggttgcaacagagactattgcctgcaatgcctaagaaaaagtttgctggcccctgttttaggccttttgttgaaaagcaagttgtaaatccatgctgatatttccaattcaaatttagcatcaaaaattttatttaacttctttgcttttatatgtgtatctcttttcttatactgaaaaaaaatcttgattctagaattttcccaggactcatctgtctttaacactgaaagtcgtagatactgggaaacccctcagacataagcaaactggtacagttgtttaccttacttagttcttaaaatgttaatatcagtatgatttttgtttatcttataatatgagttaaatatatttaaattacaccaaattatcactaaatttatttgctagtttatttaatgtacaagatatttaattaaaactgttcactcaaattctacattctaaagtcagttgaaataattttctttatgattatattaccaaagtaatgttcagttagatacattattttagtttttattcctccttttaggaatacccttttacttgtttattttcaatgtgtaaaacaattatggccgggcgctgtggctcacgcctgtaatcccagcactttgggaggccgaggtgggtggatcacgaggtcaggagattgggaccatcctgactaacatggtgaaaccccgtctctactaaaaatacaaaaaattagctgggcgtggtggcaggggcctgtagtcccagctattcgggaggctgaggcaagagaatggcgtgaacccaggaggcagagcttgcagtgagccgagatcgcaccactgcactccagcctgagcgacagagtgagactctgtctcaaaacaaaacaaaacaaaacaaaaaaacaattacatgattctacattcaaaactctacagcaggctgggcgcagtgggtcacatctgtaatcccagcactttgggaggcygaggcaggcagatcacttgaagtgaggagtttgagaccagcctgggccacatggtgaaaccctgtctctactaaaaatacaaaaattagctagtcatggtggcacgtgcctgtagtcccagctacttgggaggctgatgtgggagaattgcttgaaccagggaggcagaggttgcagtaagccgagatcacaccactgcactccagactgggtaacagagtgagattctgtctcaaaacaaaacaaaacaaaaaaccaacaactctacagcaagttttactgagagaagtctcacctctatgcatgtttccgctctcctcttagaggcagaagtttttagttttaattagttttagttttgttcttccagtgggtgtttcgtttgttttttaaatatgagcaaatattataaatgtatatatttatttatatcccccatactctatatactattgtgcatcttgctgctttcacctaaaaatacatcctgaagattattgcatatcagcatatagagatcttcctcaatcccattttattattctatagtaatattccattgtatacatgaatcacagtttattcacctgtccctctattcacaagtctttgagttgtttgtaatctttttctattaaaaaatactaccttattcacaagtcattttctaattctgcctgtgtagttttgtgacagatttctagaactgagattgttctatcagatggtgaaggcatacataaatttgcaagatattgccaaaccatcttttactatagttgtaactattttttattccaactaatgatatacaagatattctattttctttcaccatgaccaacccaataagctttcaaacttttgattttcacccatatgataggtgagagttgttatctcagcatgcaggtaatttgcatttcttttattgtgagggttggattttgaaacagcaaaaagggaaggaagcccctgtgatgaccaagagcctgagcatgctttcagttatttcctctcttatgtcaaaaagcatctttacaccacgattgtgaatttattcacaagaaataccaaatttcttctttcattattaacaactctgtcttcaactgccatagtttccagagaattgaataatgaattgtccaaaaccacagaagaaaagttgctatttgagagcatatctgtctgataacgagttccctgatcagtgaaactgcactatgccaaatgcagagtgggaattccaaggaagaacaaagatctgttacaaggaagttccatagaagatacacccaactgtgagtaaacagctggtaagcaaagtagcaaggtgaaataaacatctaggttaagaagaagttaagatctccaggtactacggagatgaagaaaacaaaaaaaagaagaagttaagagaagtaaagatgaatcgttagcacatagttctattttcatagataacatttttgagatatatatagtgattttctgtagatatatgagtatacccagatatccctcccacctacaccagccctttctccaaaaggaacaatgcttgagggtgttcaaatggccttttttcaccagtggctgggagccttagccatggaatgggctgtcctcatccacagtgtcccactgttttttattgccattaatgtcttccatttttagtgtcatttgatccacggaaatcccaccctttcaattttcccattgtatctgagcatatcaattctctcagcatccaaatggtttttgagcacccagtctaagctaagcatagcccaatcctaggcaacttcagcagaaaatgggtaccattacagcaaaagcagcggtgtgcttcctggaaaggataccagtagccaaagaagttgatgatagtccatggtaatatacaaggctgcaacacagttccaggaagcttgacttcagcattgcctccctagccatgagcatcactgattccattgtgtgtttaaatgtgctttacctacttctgtgagtcacatgtgggccatttagagggtgaaaagtgttggtcattttatcaccccgccctcctcatttcctgaatcttgtgaagctggctgagtcccacagaccgctagaggaagaggtagctccacaggaggtacagctgcttacacatctctcctcagagctgtcccttgacttgggggtgaatttcaggccaacaggscttcctgggatacargagcgttctccatggatctgccttactaccatggacgtctgaccaagcaagactgtgagaccttgctgctcaaggaaggggtggatggcaactttcttttaagagacagcgagtcgayaccaggagtcctgtgcctctgtgtctcgtgagtagcctcatcttgcacacatctgacatcgtatgttgaatgtggcaatggctgccacacagtacaggaattcatatccctcagtatttcactctgactttggagtctcaatgagtagaatgagaagtaatggacactgccaggagaggaatgtatctgtccatgctcctccatctgcctgctctccctggtgtaaaggccctgcaagcagactctgcagcagcaggagggacatggtggtggtgaagggaagggctgcaggaagtacaggggtacagagggatggaaagaaggtacaaatgtcagaggtcctgtcctccagagatctgtttatttggtatggaaaaggctaggggttcttcaagaaatttcaatctgaaasacttattctgcagcatctgcttgcaatacgtaaactataaatacaatcatatttcacattttgttagatttgtgaaggacttcaatattcgtcatttcctttcatcctagtagtctatcaaggcaagcataagcagtcaccatttcataggtaaagaaacagagacctgaatttctcaaataatttgtttgtgttaaaactcatttggaatttccagagtctaagttaaacatgaaattccaggctgggcatggtggctcatgcctgtaatcccaacactttgggaggctgaggcaggtgaatcacttgaggtcaggagtttgagaccagcctggccaacacggcaaaaccccatctctaccaaaaatacaaaaattaacctggtgtggtggcgtgtgcctgtaatactggctacttgagaggctgagacaggagaatcacttgaacccaggaggcagaggctgcagtgagctgagattgcaccactgcactccagcctgggcaatagagtgagactctgtccaaaaaaaagaaaaaagagtggctgggcacagtggctcactcctgtaatcccagcactttgggaagcggaggcaggtgaatcacctgaggtcgggagttcgagaccagcctgaccaacacgaagaaaccccgtctctactaaaaatacaaaattagccaggtgtggtggcgtatgcttgtaatcccagctatttgggaggctgaggcaggagaatcacttgaacccgggtggtggaggttgcagtgagctgagattgtgccattgcactccagcctgggcaacaagagcaaaactccatctcaaaaaaaaaaaaaaaagaaaaagaaaaacaaattccaggccacagtatcaaagagacctagctgaaggaacttgtttatgcccagtttagaaagcaatcytgaacagaaatcactagaaacctcctatctttatgtatgttcctctttgtaaagtagggaccactgaaccttttattatacctgtaacagaaattaaaatccaaatgtctcttgttaaagaaaaaaattactcaatgtcacttgttaaattatggttgggaagactttattcaggatcatcacaaaggtacagggaccactgcaatgagctcttgcggcacagaaaagagactggactcaactctgaatccagcatggacaagtgggaatttatggccaaggagcagtgtggctgtcrgtagacagaaaattactcggaggaaacatcaggggtaaagtggattctggctaaaccagcctaacagaattgtagctgaagacaggccmgggtgatcagatgttgcctgggggatggtggaggatgaggaatctgatcagaatccaacagtgatcagatagctagggtgagrggtccttgccaaactgacttagtagggttctttgctaaaactggattttacaaggaagtacacaaatgggccttggaataggctcagaagtctgattatagacaaaagtgattgtcattactaatagaatacacagggacatatttctttctttaaatggtactggagatacaggctatttctctcatatctacatccaacagtaccatttaaagaaaaatatatattggccaggcgcggtggctcatgcctgtaatcctagcaatttgggaggctgaggtgggctgatcactgaggtcaggagttcaagaccagcctggccaacataatgaaacccccatctactaaaaatacaaaaattagccaggcatrgtgggtgcagttgtatcccagctacttgggaggctgaggcatgagaatcgcttgaacccaggaggcagaggttgcagtgagccgagatcgcgccattatactccagcctgagagacagagaaagactctccatctcaaataaaataaacaaagagtggawaagatctgcttacatgtaaatgggatggagggcattttagraaggggaggaggtaggaacaggagtctagaagtgggatattttaaaggatttacatacaaggttcctaaaatgtagtttggaaaccagcttttggaaaaggagggtgggataagatcatggagttttaaaagaatggttctatagataacagggaaacatggatggtttctgagcagggaagtgaaaagactggtgaatttaggaacttcaatttgacgtggagaacacaatgaagctgggaaatgatggcaacagaaactgttgtgtctctggacgggagacggtgaagagctagttgtgctggggcaagcagtgggaagggaaaaaacaagaaggtgcaaggacagacmttggccaggatctcagggtatatggtcaatatgggattctcttccttyctttctttctttttttttttttagacagggtctcactccagctcctaggctggagtgcagtggtgcgatcatggctcactgcaacctcaaccttctgggttcaagagattctcctgtctcaggccccctgagtatctgggactacaggtgcacactaccatgcctggttaatgtttaaattttttgtagacatggggtctcgctatgttgcccaggctgatttcgagctcctgggctccagtgatccacccacctcagcctcccaaagtgctgggattacaggcatgagccactgcacccagcctatattgggattctctttgaaaattgatatttattctcaactgttctgtggtgcatcagcccatcttgcatattcatctaaagcaaaggtcactaagagatgctaaaaaatgggccaggcgtggtggctcacacctgtattcccagcactttgggaggccgaggcgggcagatcactaggtcaagagattgagaccatcctggccaacatggtgaaactctgtctctactaaaaatacaaaamtaattagctgggtgtggtggcatgygcctgtagtcccagctactcaggaggctgaggcaggagaattgcttgaacccaggaggcggaggttgcagtgagccaagatcgcaccactgcactccagccgggttacagagcgagacttgatctcaaaaaaaaaaaaaaaaagaagagaaaaaaagagaagctaaaaaatgaaaataaaccaagtggagaggcaaaaataaatatttgttaagcccctgcacatgatcaggtctcacccacctccctacacatgtcactgaaaggcaaacaacatttcattcaccctcaggcttaaggcttaggtcaagtgacccctgaagctatctcctcatagggccttgtaaaaatgtattatcatacagataagtatggactattaaattctagttgttcaacaaatatttgaattctctcatatgtcagacagtgtgctagacactcggttgatgccttcaacacaactcagagcctagtggggaaaataaagaagtaaacagacacagtgatgcatgtgataattatgatgattggactatcattagggcactgtagagctgacagcaaaaaggggagaaccagatattggagctgagactttaggagaataagtggaaccttcattcattcaacaagcatatactgagcacttattatgttccatgcgtggtcctaagcattggtaatacagtgataaatactactggcaatgtttctgccctcatgaagttaatttcagtaagaggagaaaatatgatgaaaatgaaacagagtcatrtgacagggagagacacagctgctgctttccattgggtacaggaaaggtttctctgaagaggtcacatcaaccaattcatgcttcaagatacaaccctttgcaagcaaagcaagaattactattatgatacaagtgttagcctgcttgtcttcactgacacagaaaaagttaccatgtaggtattatctatgagccaaacattttgctaagcatggtacatgcattatcttatttgtcatttgcaatccctttgcrgtaggcgacatgatcactattttgtgagaaaataaactgtagcttcttatttaatagcttgcctagggccaarttgctaatatgttattacattccctctcttaccaatgtccccagcttcactgaaatatgtttcaggtaatcaccttggatctgtgttataaaatgcccaagcaggggacctgagggcttgggagtggactctgatatgcagtgtccccttcttctctgctgcattaaaatgggtctcccctggacacccagctttaaaatttctctgttttgtactctttcyctttatttcttagactggccgacacttagggagaatagaaaagaacctacgttgaaatattgggggctggttcccccgatacttcaggactttcacagagctaaatatttagtgatgaaaatactgtgaggaaggttagaaataaaagaaggaggtcacagagagagctgacctagcagcatatggcactaaccagaaagctatgtggtaactgtggacaggaaatgttttctgatcttacaatgtaatagagtgtctagaaaactccagtgtgtaaaaggttgtctgtgtagtgtgactttgtgagtgtctaaactgtctgcctttatcatcagtaaaattaaatggagtagatattaggaggtgcaaaggattcatctgcaagtgtgaagaaaaggaggactttgcaaagccataggaaggctgcaggtgaggaagacctgagccctaacctactgcatgctctcattaagaataataatggcaatgtctatctattgccttgagagtcatttatgagtctcagattctgagacttttgcaaggattgtagagtacagaaagaaaagaaatgatccattttgttgtggtggtttatcaagctaatgaaaattcattttagaaaatcaaatatagagaaaggtataaaaaacaaaacaaactatatcagtctcaccactctgaaatcaccatttttaatattttggcatacatctctccagacttctstgcgcatctataaaccaatatatgtacataaatggttcattatacatgatsgcttgcaacctgttttctccataattgtaggtctctttccccatcaaagaaagcaggtcatccccttatgactgcttagtattttattgatttgatatatcataatgtatacatatcatacattaggttattttcaattttcatttgcaatttagtccagtggactcagtgtaatttggaatgattaacatttttgtacttacatctgtgaaagtttgccttactccctagttaggataaaatcctagatgtttaaaaaaatcttcatgcacactgaaaaattagtaccacaaaaggttgcaccaagatacactgagatcaggarcagtgataaggccagaggtcaaaagtcttaaaatatttctttgttgacttggatttcccacttgcatcatggcatggaaaaatgcagaacacattgttgatattatagggtgcagtcgattccatttccttcagctgaccttttgaaggttagttaaaataaaaacttgaacacaaacaagtttccccacaacaatggccacaacatgagaccgtgctaatctgtgggctgttcatgcgttgagcaaggactcagagatccgtgcacagcacctcatggaacgatcactttgaaagctaaatagatagagtaaaacaattcaaagatatgggaaaacttagaggtcctgtattccagcctttttgaacctcaactgagaaattaatgcctaagatttttaaatgwtttttataagtccagtgtatttctcataaatgacgacaaygatttccatagaataaacaaaaaggtaggctccactgggtatcagtctcacacagagagtcaagacaccacatatttattgagaacataactgcaaaaataggaaacactttttctatctgaggccaaaaaccaatcatgaaaacagcaaaagcacatatgtataaggaattaaaatttagtttatatattagaaagataaattatattcatctacctttttatgccatgaatatgtcttactgctttattgaggtatcactgacataaaataaaaagtgtacaatttgatggattttgacatatgtatgtacacttatgaaacgaacacagccaagataatgaacatatttatcacctccaaaacttcacttgcacccctttgtaatttctcatcaacatacctcccacctatgcccagactctgggccaccacaaactgctttctggcactatagattaatgtgtatttttccagaatttaatgtaaatcaaatcatagagtatgtagtcatttttatctgacttcttttattcggaataattattttgagatccatctatgtggttgcatgcagcaatagttcatttttttgcattgctgaatagtgctccattgtagggatgcatcccaaattgcttactcatttatagctattacarctaaagttgctatgaatatttgtgactaagtctttgtgtgggtgtatgctttcatttctcctgggtaaataatcaggattggaacagctaagttgtgtgttctatgtaggcttatcttttttaagaaactgccaaactgtttyccaaagtgatcatgcgatctcactattcccatgggcattacatgagttctgattgctctacatccttaccaacatgtggaacggtcagtcttttacattttaactgtattaataagtgtgtagtggtatctcattgtgagttgaatctgcgtttcactaatgactaatgatactgggtatctttacgagtgcttatttgccatccatgtattttcttttctttttttattgaggttcaacagcagattttactttttttatttttaaaaacttaagtctaattcaagtaaaataagctgtacatatttaaagtatacaatctaattcattttattttatttgatagataaaattatatgtacttattttgtacaatgtgatgttttaaaatatatatacgttgtggaatgactaaatctagctaattaacatatgcattacctcatcaagttatcatttttgtagtgagaaaacttaaaatatcctctcagcatttttcaaaaatataatatatggttattattttattttattttttttgagatggagtctcactctgtcacccaggctggagtgcagtggcaccatctcggctcactgcagcctccacctcctgtgttcaagctattctcctgtctcagccgcctgagtacttgggattacaggtgcctgccaccacacccagcaaatttttgtatttttagtagagacagggtttcaccatgttggccaggctggtcttgaattcctgaccttaggtgatccacccaccttggcctcccaaagtgctaggattataggcctgagccactgtgccctgcctaagaacgtaatatatggttattaactatagtcatcatgttgtacaatagatctcttgtttaactgaaattttgtatcctttgaccaatatctccctaatyctccccctctcactgacaaggcctgagaactctcattctactctttagttttatgatatcaactttttttagatgccacgtatgagtgagaccatgtggtatttttctttctgtgcctggcttatttcagttaggataacatcctccagatttatccatgttgttgcaagtaacaggattttatttttctatggctgaataatattccattgtgtgtgtgtgtgtgtgtgtgtgtgtgtgtgtgtgtgtgtaactttcttcattcatctattaatcaagttaggttgattccatgtcttggctattgtgactaatattgcaataaaagtgggagtgcagatatttcttcaacatactagattcatttccattggatatatacacagtagtgaggttatatagtaattacatatatatatatatatatatatatatatatattttttttttttttttttttttttcagacagagtctcgctctgtcgcccaggctggagtgcagtggcatgatcttggctcactgcaacctccgcctcctgggttcaagcgattctcgtgcctcagcctctcgagtagctgggattacaggcatacgccaccacacccagctaatttttgtatttttagtagagacgtggtttcactatgttggccaggctggtctgaaactcctgacctcgtgatctgccctcctcagcctcccaaagtgttgggattacaggcgtgagccacggcacccggccagtaattctatttttaattttttgaggaacctccatactgttttccatatggctatactaatttacattcccatcagcattgtacaagggttttcctttctctatatcctttgtcttttttgataatagccattctaacgggcatgatggtgggtgcctgtaatcccagctacgcaggaggctgaggcaggagaatcgcttgaacccgggaggcggaggttgcagtgagctgagatcgcaccactgcactccagcctgggcgacagagtgatattccgtctcagaaaaaaaaaaagagtttttttaggattgtagattaacaaaggtattgcatatgaaacataacgatagatgttacctggatttgcatagaacattttgattcacacagtcattttttccacaggtttaaaaatattgtctacacataccgaatcttcagagagaaacacgggtattacaggatacaggtaagaacaaaaaggacgacaacaacaacaacacaaaagttgggggagaagaacctgggaacatgtcttttacctgagccatgactgtgcgaaagcattctaaaaaggaaagcacaatgcagagatgagagtcagatcgagttaacctggtttttccctgaagagaaataggaaggttctaggcttgggttctactttttttgttgttgttttgttttttttagacggagtctcgctctgtcgyccaggctggagtgcagtggtgcgatctyggctcactgcaacctccgcctcccgggttcaagcgattctcctgcctcagcccccgcccccccaagtagctgggactacaggcgcgcgccaccacccccagctaatttttgtattttcagtagagaagggttttcgccgtgttagacaggatggtctcgatctcctgaccttgtgatccgccggcctcagcctcccagactgctgggattacaggcgtgagccaccgcacccagctgggttctacttttgaataaccctcactgttattccactgtggctcctccactggccaaacacaccagcctggactccaagcaaaacctccgttgaattagaagactcaacaatgatgcaagatggagctagaaagggacggtggaaagagktcagagtgtttagggagtcaagtgtgcccaatagttgtacgaaaatatagtgggaagcatcagatagctgaaagtcttagggtttgtttaatttttctggtttactgagagctaagcagaaaaacattttgcttcttttaaatttagttctctggcttaagaagtagagtataataaacataactgctaacagagaatcctaaaataatctttctcaaacacttacatataaggttaaggagactacagatttctaagaatcttcagtatattaatgtttactctgaatatctgaaagagactagaatataaaatgatccccaaacacctcacttatactatttttcttttgctatagaggacattattgaggcagttgacaaaatttgaataaattcaaattttgaataagattaacaaatagtactgtatccaggttaatttcctgattttaatcattgtagtatggttatgtaatatccttacttttgaagaaatactgaagtatttaaagggatattatgtctgcaaattaactttgaaaatagcttatatatatgtgtatatatacatgcacaatatatgtgtatatatttggaaagagaataaaaagcaaatataataaaatgttaacattggggtgtgggtgaaatatatggtaatttttaaaaattatttttgcaactttgctatgtctgaaataatttcaagataaaatgtcttataaaaagcaacttattttaagacttttttttctgtttattctttgggaaattctggataattcctcagtaccctgttttgtctcttgtgtggacaaaatagagggagacatccaaatcatttgtaactcagacacaaagaggcgtttcactggggagcagctttgagcttagaagcctgcagtgatgccttttgttgaaatgactgcattaaaggaacctccttgcagatgactttgatgtcagcctgtacctctaatacagaggttaatcaggcgcatatcagaaaaccttctgatcaccaacccctttctctagtctgacttggtggccatatgaaaaccacagtgacgatcaagaaaaccaaatacacaaaagtagaggaagaaaattcatgtgtgtgtgggtgtgtaagacagagtcttgctgtcacccagactggagtgcagtggcgtgatctcggctcactgcaacttccgcgtcctggttcaagcgattctcctggctcaacctcccgagtagctgggattacaggcgtctgctaccatgcccagctaattttttgtatttttagtagagacggagttttgccatgttgaccaggctggtctcaaactcctgacctcaagtgatccacccacctcggcctcccaaagggctgggattacaggcatgagccactgagcctagccagaaaattcttttcattttaaaattatttytaaaaggttatattagaaaatagtgcttggtgggccaggcatggtggctcccgcctgtaatcccagtactttgggaggctgaggcaggcagatcatgaggtcaggagatcgagaccatcctggctaacacagtgaaaccccatctctactaaaaatacaaaaaaaaaaaaaaaaaaaaaattagccaggtatggtgatggtgcttgtaatcccggctacttgggaggctgaggcaggagaatggcatgaacccgggaggcggaacttgcagtgagctgagatcacaccactgcactccagcctgggccacagagtgagactccgtctcaaaaaaaaaaaaaaaaaaaaaaaagtmcgtggtgtatagctggtaaacagaaaacatctatttacaacttaactgagttgtgtwgccattcccactttctatttacattgggacttttttggttttgttttgcccacatggagattgtgaattcatcaagtatacaaattgtgtattttaaattcataaagtatacaaawtgcatattttaaagacatggaatcaacctaaatgcccatcagtgatagactggataaataaaatgtggtacatatacaccatggaatactaagcagcctaactgttctccaaatttgaaaaaccaaatcagaggctggtggttcaccttttaaagccaataaagagaaccagccccagcttgagatggagaggatcgaaattagagttggaagcatttatggtaaaatctctcacatggggatcagaaaggagcttaggtcaaaaaagaatgaaatcatgtcctttgcagggacatggatggagctggaggccattatgtttagcaaactaatgcaggaacagaaaaccaaatactgcatgttctcacttgtaagtgggagctgaatgataagaacacatggacacacagaggagaacaacacacacaggggcctgttggagggctcagggtgggaggagggagaggatcaggaagaatagctagtgaatgctgggcttgatacctgggtgatgggatggtctgtgcagcaaaccactacggcacacgtttacctatgtaacaaacctgtacatcctgcacatgtacccctgaacttaaaataacagttggaattttttttaattgcatttttgcattcccatcagaagtccacttccgatagtcccttaagatagcaaagcccgcctgtaggtacagacgtaagcccttacaggggtacccttcacagtgtatctgcgagaactgccccaggtaaacttsccaaggatggggttcacttgatactatggactgcgctgggatcccttgattgcaaatcctctttactcagagtggctcaagtcagaggttggtcttagaaatgagagtttctgtgaactgggagtggtgtgagctccagccacttgttttcagtttttcagctcatagaagggcagccctgaaaacccactgctttgagaagtgtcacatttcacacgcaattgcatgataatgagtgatttcctttcttgtatttttgcagactgcagaaggttctccaaaacaggtctttccaagcctaaaggaactgatctccaaatttgaaaaaccaaatcaggggatggtggttcaccttttaaagccaataaagagaaccagccccagcttgagatggagaggattgaaattagagttggaaacatttgtggtaaaatctctcacgtgggggtcagaaagcaatcttaatcctatttccaccaatgccttactttgtaaactcaatacagacaaatgctcttttctgtgacattatctctaaaaagcttcatcctactaagagcaatttccattttgttgagaagtgctgtcttttagtccctgagggccaagacagagagcttgctgcgtttgcagccaggatagcaagagtggttcctgggcagacagctgacttcaaattcattctgtgaccttgtgcagacgattcaagtttgagaataaatgggcaaatgggcagattttcaaatgagaaaatcactctagcccttcaagccctccccaaarcgtatactgttacactttgctcaatatttgctaagcattcatttataaagtgctgggtgtcaaattatgtcagatacatttttaaaggcattaagccgtagtggaaaatgagagatggtcagtaaatctgagtgcagagaatccctgcctaagcctctcaaattatatcatgagcagctactcttccttacccacactcttgaaatctgctctcagtaaagaatttactatcagttgcaatgttgtttgaatttagctcagacttccagaaacacttaggtcttaatcctgttttcccatgttggaatgtgtggttatattctcagtgaaagggatggcagttatcagtggcaggtgatgggatgagatcagatatcctccctaggagagggacagaggacagagagttctctgggagcctgcaatcactccatccccattctactctgtctgcggcaaagtcaccctttaggctgccatagccggcttctcatttccccagcaaggctaagcataaaatacaactcccttccctaccattgtgtccctgtccccccatccccatgaagggcagtgtgtactcatggacacaaaaaaatcactttctataggtccagctgcagatgtagtcccacagctactttcccccccaaatttatagaataaaaagtatacagtgtggcagatctagaaacccaggaaygtatctgtgctgcagcccttaggcaaacccagatgagttgctgggactggttggggtggtggtagcatttgtctcaacaatgagaaaagaatcataaatcccaggaggagaaccctcagaaatcttccccaagacctgggcatgaatctcactccatcagttttccatgccgggtcagtgctgacacagcaggctccaaaattctcagctactgaagaggaaatattccccatcaacctcttcctcccattcccattgcttccttagaagaagcttcagatgttcttactccaagggaggtgcagatttcttgctggtgaatggagacacttgtgctggaaggtctgaggcttggcttataaagagatctcctattttgttaggagggctccctgtagtaccccagcctttaaagatayaactttcaggtggcatcaacatggctctgtgcctggggaggggtcttctttcctttgagtggggttgtttgatatgacttctgggtgtggtctcatggctggtcttctgctttttttttccctccaaagaamagtaacagcgattatgtggatgtcttgccttraagataaggctgccggacaaagcaagttgaagagatgagtaacagttctcactgatgacccacttctgcaggcataggtccagagcaccaaactctagtggacaattcagactctcctggttgtgtaactgaagatgttctgcccaccagcaccagaggtcactctccacatccccgcctcccagacatataccaggagcaatttcaaaaccctctccagtttcactcttctttcttggaatgggacagcctgaacattttccctttgacttgttaaaggtaccaccctacatcatggttgacaccctcctttggaccatgcagtcagaggggcagctttatacagaggaggggcacacttgtctgtgagtttgaagccctgagttccagtcctgtggctgtgtgactttgaacacgtttctgcccatctccaggtcttagtttctttgtctctgtggttgggtgggatgataaacattgccccagtctctctgttgagcctgcttgtgtcaggtgaaggtgagggatcgggagtgatggagatgcatacagatcagcaccttctctgtacctgctggacccccatgtgcacccttctccctccagcctgggctactctcctcctggttctttctaatcttaaacttcctggtgagcattgccccagccacactttctccctggttttgcttaattccacttatgcatcagtcatttcaacagcatgaatgtggttctgtacagtgatgtatgtggagatttctaaaatattctatgtgtgatttctgttcccaactaggttctaagtgccatcaaagcacggttgggtctcccttgtatcttccacagtgtgtagaaatttgtgctgcccagagctgtgcctagttcatagaaactgactggaagcacattgctgagggaggtttgttgaattggtttttaaggtttaytgaaattgatttgctgaatttttctgctagttcaaaatgtgaattaggacctggtcagtttgaaatataccaaattctatgccctttctcttacctatcatcaaattgtagtaatgtatttcaccccactggacttatcttcagagttttaaaagagaggagctctcgacttagaggtaatatgaacagatgaacagacwctgtggctggagccccaaagtgtggagcattgtgagatttggggtcacagcaatttatggctactattccctgggtctggtaggtaggacaaatgtcctcttttacttttcaaaactggcttaggtattcatggaccttgattcttctatatacattttataataaatacgtgaaattgcttamaacctctttttggaatttttaatgaacttgcaacaaatttgtaaataggagagaactgacgttcttgtgatgttttcycatgcataaacatgccacatccatgttcttgggtcatcttttttgccctttcatggagtcataaattttcccaactgaagtcttgtatattctgttagattaattcctatttctagttgctgtaaatgatatcttatgttttattacatttctaataggatatggtgttggtgaaatgttaaccctctcattagatctactagtttacctgttgattctattgtgttttctatgtaaatgattttgtcagctataaataataacattttattttctctttccttgcaatacctatgctcatttattttttatgtttacccattggttagggcctcctgtatacattaaacagttcatagtcatgatagtgagtattcttacactgttcccagtattacagggaatgcttagaaattttctttatttaaacattatgtttgttgtagccttgttaaaggctattttataatttttactagaaatattttgacatttattgtgatttttttctatctctaatctattgagatagtcacattccttttgtcttcactccattataaaggtaagttaccttaataaaattgttgatatcatttcatccttgcattgcttcacttgataatattttattatttttcataaactgtggaatttggtaagttaatatttcatttaagatttttgcattaaaactcataaaccaaataggactataatttactgaatcatggttacactgttcatataaagcgaagaaaagtctttttccttttaccattttctgcaacaactcttcaggtaaagattatttgttctgggctgggtgtggtggctcacacctgtaatcccagcactttgggaggccgaggtggggggatcacttgaggtcaggagctcaagatcagcctggccaacatggtgaaaccctgtctctacaaaaatacaaaaatgtagccaggtgtggtggcacacgcctataatcccagctacttaggaggatgaggtgggagaatcgcttgaacccgggaggtggaggttgcagtgagccaagatcatgtcagggcactccagcctgggtgacagagtgagaccctatctcaaaaaatatatatatagtaaataaataaataaaaataaacttatctgttccttgacattttttagtacagtactttcttataaaactgagtttgagactctggtggggtggggtggggtggagtgggggggcatcttcaattactatttaaatattaatactttttgatttgttaaaatattttgccaattttgactttttttgtttttctagaaatgtgtcaattttgtctgttttcacaattattggcagatagtttgtaatattcttgcattattttaatgctttcttgtgactgtagcaacatctcctttctcacactgtgtctatttggatcttactcttttatatttattgattttatctatcttattagtcttttcaaagccagcttttggttttgttcatcttttttgttactgcttttaaattgttattctctatttatttgatttccagcctcattttaggggggcttatctgacttgttttcaatacttattattttctaataaatatatttatagttatgaatttagctcaaagtactattttagctgtatcccataaattttaacacaaatagtggttattgcagtttaggtcaaagtatttttaattcttgtaaaagtatcttctttaatccaaaaactatttagtagttcgtaattgttttcaaacatacatttttagttattttagtatagatttcaaactatatcacgttaaggttggataacagcctgacttcaatttctgaggcttccttgctgacctggtatatgtgaacattctgtgaatatttcatttgtttgaattactctctctattcattttaaagcttgttctctttacctcttccccaaatgtattcaagattatagattatataaaacaaatattttcatagatttgcatattttatctatttgatctatcagcgtcagagaaagataaatcttttattttaattctatatataatagtatttaactttctgattataatagttagtatattaactagtttttgttattttaccattcttattttaactgttttttaatatttttatgtgtatatatttttattactattttatcatcttcatttcctttattttataaagtattcctccttgtctctcattagttttgcctttatttatattttacatcatattaaaattgctatctcaacttttattcatactttcctagtatgtaattttctgtcctttcattttcaagtttttacaccttttatctctgtcttctgtggacacaatattgctggatcttttttttttttccaatttaagattctctccttttgtttggtgagttcaaaacacatgtttattataatttgttctattggaatttataactgccatcttatacattctttccatttgctatacattttttcctttttttctccttttctgctttccattgaatagatcaaatttatctctgttaatttgaaagctctattaaaaaaatttagtgtttacccataacttattaggccctgtatttttatttttctctataacattgtaaatatatcaattgttataatttaacatgctctcatttctcttctgtcaccatcaccaatcccatcagattttctgaaattatctaaaattttaattgttatttactcttttgggtcctttatcatttaaataacagtatactttactgagtcaattagtcatccttcttgtaaatttaaaaaacacatagcactctcctgagtttctcttcttggcagaatattttctgcaaaagtattttgcatatttgaaaattgctatgagagcagattttaagtgttctcatcaaagatggtctttgagtggtaaaccttttgcggtctttttaattttagattaatttaaatgatagttgagctaaatatagaattgtaggtttaaagttattttccttcagtgatataaaacatattaagttgctagcactttatgtgtaggtttcttactgagatgtctaatgtcaatctgatcctccttcactgctgaactttttcgtggaaagttgaaaaatggcctgtcttcatgatcttaaatttcactgtgatgtgtctaatagtgagttttttcttctctatcaaatatgaaaccttataggccattttgttcttgggattttaatctttctttacttttattactatttaaatgaatagaatgaatgaatgaatgaatgaatgagaattctcattcatttttcaaagatttcttctattttttccctcctactggaatttctaattaagaactgtcctctcttttattttgcccttgaaatgatatctgttaagtgatcttaggaaagatacaagcctctctaaaatggagacaatatttatctcataaattactattagttttgtcatggaagtcttcctttcagttaccagaaactgcaatacctgatgccagccacaagaggccagacagccatcaagaaaactagtactgcttgagggttttattttcctttctttccttccttccttccttccttccttccttccttccttccttccttccttccttccttccttccttttctttctctctctctttttttgtaaagcactgctgagtaccatggtagctattagacctgaaatatttctttagcaagtattctccaaacagtactcacttccccattgaatgcttaatctccagtgtcgataacaggattagtttctaagccaggcttccctgagtttgcaatgtgagatgtaataggtgctcttgccactcctactgcagggcgaaattcttgcaattcagagaaggctcttaccgacacccttaagaacgaatgttttcaggaggtactattgttagctctgtcacttactggtagagtgactatgggcaaattgctaagactccctaagcctctggtcagcttcatctagaaaatgaggataatgacttaccacataaagttactgtggagcttcactgagatgacgccagcccaggttaacatgttaacaatgcagtctttgttgtttcctcttttgtaaaatgaggggactgtggaatgggtctttaaattcccatcccatgtgaatatgcagtgtttaatgaaactgtattactccttggagaagatctaactcaaaaagatgtttctgagccatgaacgtttcctggaattatttatcagactggcgcgatggagatagagaagtaggggagggtggctgttcctcaggcctgaagacttaggtcttcccagagagttctgcctctcagttgtaagacccagggaattggcttagacatcatctcagtctcagtttacctcttcctaacatggggctgaaatacctccctcacaagataggattcatgagatcttgtgtgtgaatctctttaagcacaatagaataacatccgtatctggaaaatgggcttagtaagacctcccttggagggctatgagaaaaacaaatgagaccatgtgtataaattgattaacacaattcctggagtatatagaagcttcagagaatgataaagcaccaattaacagtcaagcctaacacagtgaagtagaatgttaagaattggaactcagagccctgtaggcagctcccagaggtaggcaggtgcctggcactgaagcacagcccttcttgcattatgctggatataagtgcttgcttctaccagctccgtggcaaggtggcatctgtccaaggaacagagttaatgaaggctccggctgcagataaatgagcttcacattggcccattaatcactttccacttcgaaaatggccaccctcaatccttctctgtggagttgatgatcatgtacagaggctgcctgcggatagagatcctgaggaagaggggctgaaagagtcctgctggtctaccccagagcctgtctagtctgttccacacaaattcaactgcaggtttcctgagtttagttccattcaaagtgcatctttatcgagctcctgcaatatgccagacactgtgctgggaaccgaggagtcagggatgaagatggcatggtccctgcccctgagctcagagacctgggggagagaagcatgaggatgaagcgactttctatgacacatggagagtaccgtgatggaggaacacataggatgctacgggaacgcagagaaggggtggggtggtgtccgggaagccacctggaggaagggatgcctgagtggaaatgtgaaagatgaattaacatagcctagcgaagtcagaggaaagggacaggaaggtagaaacgtgacccgggcagatggaccatcttaaacacaggcatggaagcaattcggagcaggctggggctctgagggaagtacagcacagaggcagcagtggcagtcgccgccagcgaggcaggcaggccggccacaaataatccagagtgcggagaacccacctgacacctcccccacatgcgtcttagcaagcctcctggccaggtcacagcatgtgccacctacacagtcgatgactgatgattaagggggtggggtagggagaggcatggacaagactgccacccccacctccccctctagctttcttacacgtgaaatcgcttcctagatggcttacacagcctctccgggaggcccagttcctagaaatgtcacacattggccaggtctaaagactacttgccaggtcagctgcaaagacttcctgacacataggacccaggatttaagctgaacaagggaggctggctgcaacagaatttaccaagtaccaggagattatgggaaggcaaaacaacaggggcagtccccgcttgtcttgagctttcctatccagcaagggggatccatccattgcaggctcaggataaagtggggggcatgcatcttgctgaagctgcaaaccgttcccagggcagacagttcacttttctcctgcccctttggcttgccccatgaaggcctggaccaacccaaagcactcctgtgacaaccacagggaattgttctaagttgctgtgagtgagcccccgaagtgggctgaacactgggatgtgcttgaacatcagaccaagccaacaagaatttcccaataaacgcaagcctagaaagcaggtggcggcagacatggagcgatgattcaggaaataggtagctaagcagatggcactggaaacagctggctggttaaacagtaaaaaaaaaatgttgcggtttgtcggaaggttgctttttgtttggggttttttgttttgttttggtcaattccaaagaacacactggcaatgttccctgctctatataaccaacagactcctcaggcaacttgcacgaaggagaatacagtctggagtctgaggtggtccttaaatatttcctcaagcttgcttcctcgtctgtgttgttaatagccaagtgattcgttttgtggggtagcttccccaggctcccttgggctgga

SEQ ID NO: 93466 - DNA, 13393 bp, Homo sapiens
  misc_feature (1)...(13393): n = A,T,C or G
nnnnnnnnnnnnnnnnnnnnnnnnnnnnnnnnnnnnnnnnnnnnnnnnnnnnnnnnnnnnnnnnnnnnnnnnnnnnnnnnnnnnnnnnnnnnnnnnnnnnnnnnnnnnnnnnnnnnnnnnnnnnnnnnnnnnnnnnnnnnnnnnnnnnnnnnnnnnnnnnnnnnnnnnnnnnnnnnnnnnnnnnnnnnnnnnnnnnnnnnnnnnnnnnnnnnnnnnnnnnnnnnnnnnnnnnnnnnnnnnnnnnnnnnnnnnnnnnnnnnnnnnnnnnnnnnnnnnnnnnnnnnnnnnnnnnnnnnnnnnnnnnnnnnnnnnnnnnnnnnnnnnnnnnnnnnnnnnnnnnnnnnnnnnnnnnnnnnnnnnnnnnnnnnnnnnnnnnnnnnnnnnnnnnnnnnnnnnnnnnnnnnnnnnnnnnnnnnnnnnnnnnnnnnnnnnnnnnnnnnnnnnnnnnnnnnnnnnnnnnnnnnnnnnnnnnnnnnnnnnnnnnnnnnnnnnnnnnnnnnnnnnnnnnnnnnnnnnnnnnnnnnnnnnnnnnnnnnnnnnnnnnnnnnnnnnnnnnnnnnnnnnnnnnnnnnnnnnnnnnnnnnnnnnnnnnnnnnnnnnnnnnnnnnnnnnnnnnnnnnnnnnnnnnnnnnnnnnnnnnnnnnnnnnnnnnnnnnnnnnnnnnnnnnnnnnnnnnnnnnnnnnnnnnnnnnnnnnnnnnnnnnnnnnnnnnnnnnnnnnnnnnnnnnnnnnnnnnnnnnnnnnnnnnnnnnnnnnnnnnnnnnnnnnnnnnnnnnnnnnnnnnnnnnnnnnnnnnnnnnnnnnnnnnnnnnnnnnnnnnnnnnnnnnnnnnnnnnnnnnnnnnnnnnnnnnnnnnnnnnnnnnnnnnnnnnnnnnnnnnnnnnnnnnnnnnnnnnnnnnnnnnnnnnnnnnnnnnnnnnnnnnnnnnnnnnnnnnnnnnnnnnnnnnnnnnnnnnnnnnnnnnnnnnnnnnnnnnnnnnnnnnnnnnnnnnnnnnnnnnnnnnnnnnnnnnnnnnnnnnnnnnnnnnnnnnnnnnnnnnnnnnnnnnnnnnnnnnnnnnnnnnnnnnnnnnnnnnnnnnnnnnnnnnnnnnnnnnnnnnnnnnnnnnnnnnnnnnnnnnnnnnnnnnnnnnnnnnnnnnnnnnnnnnnnnnnnnnnnnnnnnnnnnnnnnnnnnnnnnnnnnnnnnnnnnnnnnnnnnnnnnnnnnnnnnnnnnnnnnnnnnnnnnnnnnnnnnnnnnnnnnnnnnnnnnnnnnnnnnnnnnnnnnnnnnnnnnnnnnnnnnnnnnnnnnnnnnnnnnnnnnnnnnnnnnnnnnnnnnnnnnnnnnnnnnnnnnnnnnnnnnnnnnnnnnnnnnnnnnnnnnnnnnnnnnnnnnnnnnnnnnnnnnnnnnnnnnnnnnnnnnnnnnnnnnnnnnnnnnnnnnnnnnnnnnnnnnnnnnnnnnnnnnnnnnnnnnnnnnnnnnnnnnnnnnnnnnnnnnnnnnnnnnnnnnnnnnnnnnnnnnnnnnnnnnnnnnnnnnnnnnnnnnnnnnnnnnnnnnnnnnnnnnnnnnnnnnnnnnnnnnnnnnnnnnnnnnnnnnnnnnnnnnnnnnnnnnnnnnnnnnnnnnnnnnnnnnnnnnnnnnnnnnnnnnnnnnnnnnnnnnnnnnnnnnnnnnnnnnnnnnnnnnnnnnnnnnnnnnnnnnnnnnnnnnnnnnnnnnnnnnnnnnnnnnnnnnnnnnnnnnnnnnnnnnnnnnnnnnnnnnnnnnnnnnnnnnnnnnnnnnnnnnnnnnnnnnnnnnnnnnnnnnnnnnnnnnnnnnnnnnnnnnnnnnnnnnnnnnnnnnnnnnnnnnnnnnnnnnnnnnnnnnnnnnnnnnnnnnnnnnnnnnnnnnnnnnnnnnnnnnnnnnnnnnnnnnnnnnnnnnnnnnnnnnnnnnnnnnnnnnnnnnnnnnnnnnnnnnnnnnnnnnnnnnnnnnnnnnnnnnnnnnnnnnnnnnnnnnnnnnnnnnnnnnnnnnnnnnnnnnnnnnnnnnnnnnnnnnnnnnnnnnnnnnnnnnnnnnnnnnnnnnnnnnnnnnnnnnnnnnnnnnnnnnnnnnnnnnnnnnnnnnnnnnnnnnnnnnnnnnnnnnnnnnnnnnnnnnnnnnnnnnnnnnnnnnnnnnnnnnnnnnnnnnnnnnnnnnnnnnnnnnnnnnnnnnnnnnnnnnnnnnnnnnnnnnnnnnnnnnnnnnnnnnnnnnnnnnnnnnnnnnnnnnnnnnnnnnnnnnnnnnnnnnnnnnnnnnnnnnnnnnnnnnnnnnnnnnnnnnnnnnnnnnnnnnnnnnnnnnnnnnnnnnnnnnnnnnnnnnnnnnnnnnnnnnnnnnnnnnnnnnnnnnnnnnnnnnnnnnnnnnnnnnnnnnnnnnnnnnnnnnnnnnnnnnnnnnnnnnnnnnnnnnnnnnnnnnnnnnnnnnnnnnnnnnnnnnnnnnnnnnnnnnnnnnnnnnnnnnnnnnnnnnnnnnnnnnnnnnnnnnnnnnnnnnnnnnnnnnnnnnnnnnnnnnnnnnnnnnnnnnnnnnnnnnnnnnnnnnnnnnnnnnnnnnnnnnnnnnnnnnnnnnnnnnnnnnnnnnnnnnnnnnnnnnnnnnnnnnnnnnnnnnnnnnnnnnnnnnnnnnnnnnnnnnnnnnnnnnnnnnnnnnnnnnnnnnnnnnnnnnnnnnnnnnnnnnnnnnnnnnnnnnnnnnnnnnnnnnnnnnnnnnnnnnnnnnnnnnnnnnnnnnnnnnnnnnnnnnnnnnnnnnnnnnnnnnnnnnnnnnnnnnnnnnnnnnnnnnnnnnnnnnnnnnnnnnnnnnnnnnnnnnnnnnnnnnnnnnnnnnnnnnnnnnnnnnnnnnnnnnnnnnnnnnnnnnnnnnnnnnnnnnnnnnnnnnnnnnnnnnnnnnnnnnnnnnnnnnnnnnnnnnnnnnnnnnnnnnnnnnnnnnnnnnnnnnnnnnnnnnnnnnnnnnnnnnnnnnnnnnnnnnnnnnnnnnnnnnnnnnnnnnnnnnnnnnnnnnnnnnnnnnnnnnnnnnnnnnnnnnnnnnnnnnnnnnnnnnnnnnnnnnnnnnnnnnnnnnnnnnnnnnnnnnnnnnnnnnnnnnnnnnnnnnnnnnnnnnnnnnnnnnnnnnnnnnnnnnnnnnnnnnnnnnnnnnnnnnnnnnnnnnnnnnnnnnnnnnnnnnnnnnnnnnnnnnnnnnnnnnnnnnnnnnnnnnnnnnnnnnnnnnnnnnnnnnnnnnnnnnnnnnnnnnnnnnnnnnnnnnnnnnnnnnnnnnnnnnnnnnnnnnnnnnnnnnnnnnnnnnnnnnnnnnnnnnnnnnnnnnnnnnnnnnnnnnnnnnnnnnnnnnnnnnnnnnnnnnnnnnnnnnnnnnnnnnnnnnnnnnnnnnnnnnnnnnnnnnnnnnnnnnnnnnnnnnnnnnnnnnnnnnnnnnnnnnnnnnnnnnnnnnnnnnnnnnnnnnnnnnnnnnnnnnnnnnnnnnnnnnnnnnnnnnnnnnnnnnnnnnnnnnnnnnnnnnnnnnnnnnnnnnnnnnnnnnnnnnnnnnnnnnnnnnnnnnnnnnnnnnnnnnnnnnnnnnnnnnnnnnnnnnnnnnnnnnnnnnnnnnnnnnnnnnnnnnnnnnnnnnnnnnnnnnnnnnnnnnnnnnnnnnnnnnnnnnnnnnnnnnnnnnnnnnnnnnnnnnnnnnnnnnnnnnnnnnnnnnnnnnnnnnnnnnnnnnnnnnnnnnnnnnnnnnnnnnnnnnnnnnnnnnnnnnnnnnnnnnnnnnnnnnnnnnnnnnnnnnnnnnnnnnnnnnnnnnnnnnnnnnnnnnnnnnnnnnnnnnnnnnnnnnnnnnnnnnnnnnnnnnnnnnnnnnnnnnnnnnnnnnnnnnnnnnnnnnnnnnnnnnnnnnnnnnnnnnnnnnnnnnnnnnnnnnnnnnnnnnnnnnnnnnnnnnnnnnnnnnnnnnnnnnnnnnnnnnnnnnnnnnnnnnnnnnnnnnnnnnnnnnnnnnnnnnnnnnnnnnnnnnnnnnnnnnnnnnnnnnnnnnnnnnnnnnnnnnnnnnnnnnnnnnnnnnnnnnnnnnnnnnnnnnnnnnnnnnnnnnnnnnnnnnnnnnnnnnnnnnnnnnnnnnnnnnnnnnnnnnnnnnnnnnnnnnnnnnnnnnnnnnnnnnnnnnnnnnnnnnnnnnnnnnnnnnnnnnnnnnnnnnnnnnnnnnnnnnnnnnnnnnnnnnnnnnnnnnnnnnnnnnnnnnnnnnnnnnnnnnnnnnnnnnnnnnnnnnnnnnnnnnnnnnnnnnnnnnnnnnnnnnnnnnnnnnnnnnnnnnnnnnnnnnnnnnnnnnnnnnnnnnnnnnnnnnnnnnnnnnnnnnnnnnnnnnnnnnnnnnnnnnnnnnnnnnnnnnnnnnnnnnnnnnnnnnnnnnnnnnnnnnnnnnnnnnnnnnnnnnnnnnnnnnnnnnnnnnnnnnnnnnnnnnnnnnnnnnnnnnnnnnnnnnnnnnnnnnnnnnnnnnnnnnnnnnnnnnnnnnnnnnnnnnnnnnnnnnnnnnnnnnnnnnnnnnnnnnnnnnnnnnnnnnnnnnnnnnnnnnnnnnnnnnnnnnnnnnnnnnnnnnnnnnnnnnnnnnnnnnnnnnnnnnnnnnnnnnnnnnnnnnnnnnnnnnnnnnnnnnnnnnnnnnnnnnnnnnnnnnnnnnnnnnnnnnnnnnnnnnnnnnnnnnnnnnnnnnnnnnnnnnnnnnnnnnnnnnnnnnnnnnnnnnnnnnnnnnnnnnnnnnnnnnnnnnnnnnnnnnnnnnnnnnnnnnnnnnnnnnnnnnnnnnnnnnnnnnnnnnnnnnnnnnnnnnnnnnnnnnnnnnnnnnnnnnnnnnnnnnnnnnnnnnnnnnnnnnnnnnnnnnnnnnnnnnnnnnnnnnnnnnnnnnnnnnnnnnnnnnnnnnnnnnnnnnnnnnnnnnnnnnnnnnnnnnnnnnnnnnnnnnnnnnnnnnnnnnnnnnnnnnnnnnnnnnnnnnnnnnnnnnnnnnnnnnnnnnnnnnnnnnnnnnnnnnnnnnnnnnnnnnnnnnnnnnnnnnnnnnnnnnnnnnnnnnnnnnnnnnnnnnnnnnnnnnnnnnnnnnnnnnnnnnnnnnnnnnnnnnnnnnnnnnnnnnnnnnnnnnnnnnnnnnnnnnnnnnnnnnnnnnnnnnnnnnnnnnnnnnnnnnnnnnnnnnnnnnnnnnnnnnnnnnnnnnnnnnnnnnnnnnnnnnnnnnnnnnnnnnnnnnnnnnnnnnnnnnnnnnnnnnnnnnnnnnnnnnnnnnnnnnnnnnnnnnnnnnnnnnnnnnnnnnnnnnnnnnnnnnnnnnnnnnnnnnnnnnnnnnnnnnnnnnnnnnnnnnnnnnnnnnnnnnnnnnnnnnnnnnnnnnnnnnnnnnnnnnnnnnnnnnnnnnnnnnnnnnnnnnnnnnnnnnnnnnnnnnnnnnnnnnnnnnnnnnnnnnnnnnnnnnnnnnnnnnnnnnnnnnnnnnnnnnnnnnnnnnnnnnnnnnnnnnnnnnnnnnnnnnnnnnnnnnnnnnnnnnnnnnnnnnnnnnnnnnnnnnnnnnnnnnnnnnnnnnnnnnnnnnnnnnnnnnnnnnnnnnnnnnnnnnnnnnnnnnnnnnnnnnnnnnnnnnnnnnnnnnnnnnnnnnnnnnnnnnnnnnnnnnnnnnnnnnnnnnnnnnnnnnnnnnnnnnnnnnnnnnnnnnnnnnnnnnnnnnnnnnnnnnnnnnnnnnnnnnnnnnnnnnnnnnnnnnnnnnnnnnnnnnnnnnnnnnnnnnnnnnnnnnnnnnnnnnnnnnnnnnnnnnnnnnnnnnnnnnnnnnnnnnnnnnnnnnnnnnnnnnnnnnnnnnnnnnnnnnnnnnnnnnnnnnnnnnnnnnnnnnnnnnnnnnnnnnnnnnnnnnnnnnnnnnnnnnnnnnnnnnnnnnnnnnnnnnnnnnnnnnnnnnnnnnnnnnnnnnnnnnnnnnnnnnnnnnnggccggggcggggtctgctcggctttccctgtggagctcctgtgctatttggagaactcccagctctggaagggggccttgggacgcatgcgaggctgcaggaccgtgtcctccaccgagcgtgaccccgatagtggaatcagctcacccaaagctcaggcttctgaggcccgggcgggggactcgaaaacggctgcttcttggtgaaaacgggtgctaaatggctgttcgagtgctgaggtcttgatgggaggcagtccctgttcgcagaggacgagtgagccagtscgtgagcgggtgggcagcaggggccctgtagcctctgggttggactcgtcagggtgaaggtcaggcgttgactcgcattaacataaagagcgggaacagcaggtgcgtctggtttacagcgtcgctgaagataccttgacctgtggactcagttccttttgtacagcatttccagtgaattttattctcctgcattccgccaaacagattacctaaaacctcgggcagaagaggagaggaggatagcagcagaagagaagaagaagcaggatgaactgaaacggattgccagagaattggcagaaggtacgagtgacactgsctcttatagattgtccctcccaggtttgtgcagggataaggaaaatggaggaggacatttaagcagagctaagtagatgcggattgtttaaaaatggggaagctggccaggcgtggtggctcatgcctgtatcccagcactttgggaggccaaggcgggcagatcacctgaggttaggagttcaagaccagcctgaccaacatggtgcaaccctgtctctacaaaaattagccgggcatggcccggtgcggtggctcatgcctgtaatcctagcactttgggaggctgagacaggcagattgcctgagctctggagttcgagaccagcctgggcaagatggtgaaaccccatttctactaaaatacaaaaaatcagccgggcatggtggcaggcacctgtaatcccagctactcagaaagctgaggcatgagaattgcttgaacccgggaggcggaggttgcagtgagctgagatcacgccactgcactccagcctgagcagcaaagtgaaattctgtctaaaaaaaattagccaggcatgatggcgggtgcatgtaatcccagctactcagaaggctgaggtgggagaatcgctttaacctgggatgcagagrttgcagtgagctgagattgcgccattgggtgacagagcgagactccgtctcaaaacaaaaaaaaaaaaaaaaaaaataactgggaagctgaagtggtctttttaggttgcctgagtggtaacatgtgcttttcttctaaccttccggcccaagatgacagcatattaaagtgagtgaccctgcgacccactctttggaccagcagcggatgaataaagcttcctgtgttgtgtgatactccggctcctcatttgctgtcgctggttgtggaattcctaggttgaagttctgtccacctcccagttcacgtgaggtggaagacagggagggggtttcaaaagaatccacattaccattcacagacccagaatgcatcatgtaaacacagtgggaaggacagatgcrcgctgcctgttctgtctggggcatccaggtggggagccccaaaggccgtctgtaatggagtcagtcagctgggggcctcatgagtactggggttgtcttgattctgagttctaggctgctgctctcagcagcccagacccctggatggggaggggtaggcactgactgacgcccttacagttgggaagctgggtcctcctccacaataacccctcgccccaacctgccatttcacaaatcctccctttgatcccaggaagtggccaggtcagacttgggactaaaagtctggtgatgtgacctcctgagcacagggcctgagtgctgtttgagttgtgcagggaggtggtcttgtggtgcctgagccacttccctccccagcaggcttcctgggcttctcgcccctcctggctgtgagcttgccaacaacccaaacccttggcctggtggtttgcaatggacagattgaatttgctacttcccagttatgtgccttgagcaaatctaggcttggagccccagtttgtaaaatgagttcgtttgcaaatataaggccaaagggagaagcagcctataagcttttcaggacatttggttaaggtgagctttgagtgagcaagatactttcacatcctgtcctggcgtccagaggggctgtttgcaggatccctcagaacctcttaagagcccctcatcccagacccaggctctggataccaggggtctctgaccagtgagatgaaaaggctgggcacggtggttcacacctgtaatcccagcacgctcggtggttcacacctgtaatcccagcactttgggaggccaaggtgggcagatcacttgaggtcaggagttcaagaccagcctggccaacatggcgaaaccttgtctttactaaaaatacaaaaattagctggttgtggtgatgggtgcctgtaatcccagctactcaggaggctgaggcaggagaattgcttgaacccggaaggtggaggttgcattgagccaagatcccaccactccactccaggctgggtgacagagtgagactgtctcaagcaaaaaacccagcacccccttcctgcagccccatggctgtgctgggcatgtctgctgctctcccacgcccaccccaatgagcccatctagttaagcgtcatctagtgttgggagcaaatgccttggagctcacatcatgagttgaacatcctgaatttaacataataccgatttcaactgggaagtccgtttctttgcctctgtccttcactccaggctcaccaatatttaatcatgggggtgcacgggcttcggcatccagccctgcactgccctcctggtgccgtctggggccatcagagccactctacatggtgtttattacagatcatttccgctcagaccactgaagttggatggccgctttactcatggccttgacctctctggcagaattttctgatgggtcaaatgtagtgtggcttccgctatcattttaccacagataatgggcaagtagttttctgtttattttattctgaattcctgagcatgtgtgttttcctaaactggatgagaaacggcctgtgtccatctgtctacctgtgtacacatatgtacatgtgtggctgcaaatgttctcagtgatttcagagttcatggacccttttcaaaggtctcccagtggtaactatccaaaaatggatgagtaatgtaggctacagtttattcacagttggcttcagtttataaaaacaggctgggcgtggtggctcatgcctgtaatcccagcacttcaggaagctgaggcgggtgatcacctgaggtcaggagttcgagaccagcctgcccaatatggtgaaaccccatctgtactgaaaatacaaaaattagccatgtgtggtggtgggcgcctgtagtcccagctactcaggaggctgaggcacgagaatcgcttgaacctgggaggtggaggttgcagtgagctgagatcgtgccacggcactccagcctgggtgacagagcaagactccatctcaaaaaaaaaaaaaaaaaaaaattaaaatatccagaatgatcttcagtcattttcttgggcttcctaacctcttgtagcaaatagccacaggcagaacccaaatcctagtgggtgaagattgagggagccatagggtcccatgggacagtgctcacasgatacagcaggttgaagacttgggtgctgggccrccattgcaaatttctgtgccyactgcaagagaagacagaagatggtgagtggaaccacctgtgcacaccagccctattccttccctcctgcctggtgtgacctctaccaacccctgcaggaggaaggacagcacctgggtctgtgaccagcccaagccgattagctgggctgagcctttcttagtgctttagcctctgttgacactgtgccctgattatgctcatcctggccttccatagtcctgaagtcgccttgtttatgtagcataggatagcgggaatagcatggggtagggggatagcatggggtaggggaatagcatggggtagcgggaatagcatggggtagcgggaatagcatggggtagcgggaatagcatggggtagcgggaatagcatggcgtagcgggaatagcatggggtaggggaatagcatggggtagcgggaatagcatggggtagcgggaatagcatggggtagcgggaatagcatggggtagcgggaatagcatggcgtagcgggaatagcatggggtagcgggaatagcatggggtagcgggaatagcatggggtagcgggaatagcatgggcgtagtgggaatagcatggggtagtgggaatagcatggggtaggggaatagcatggggtagcgggaatagcatggggtagggggatagcatggggtaggggaatagcatggggtagtgggaatagcatggggtaggggaatagcatggggtagcgggaatagcatggggtagtgggactagcatggggtagtggcagcagcatggagtagtgggaatagcatggggtagtgggaatagcatggggtagcgggaatagcatggcgtagtgggaatagcatggggtagtgggaatagcatggggtaggggaatagcatggggtagcgggaatagcatggggtagggggatagcatggggtaggggaatagcatggggtagtgggaatagcatggggtaggggaatagcatggggtagcgggaatagcatggggtagtgggactagcatggggtagtggcagcagcatggagtagtgggaatagcataaggtagtgggagcagcatggggtaggggaatagcatggggtagcgggaatagcatggcatagcgggaatagcatggggtaggggaatagcgtggggtagtgggagcagcatggggtaggggaatagcgtggggtagtgggagcagcatggggtaggggaatagcatggggtaggggaatagcatggcatagcaggaatagcatggggtaggggaatagcatggcatagcgggaatagcatggggtaggggaatagcgtggggtagtgggagcagcatggggtagcgggaatagcatggggtaggggaatagcatggggtagcgggaatagcatggggtagtggtactagcatggggtaggggaatagcatggggtagcgggaatagcatggggtagtggtactagcatggggtaggggaatagcatggggtagtgggagcagcatggggtagtgggagcagcatggggtagtgggagcagcatggggtagcgggaatagcatgggatactgggagcagcgggaatagcaagccaaacctcagagctaaggtagccaagtgcgggccaatggcaagaccacgatgcctttgggatttgaacttgggggtgtgctgacttgttgcaactaagtcctttataaaggacataagatatggttacttctttcttgaaaaatggggttcactggctaggaacagaggaaatttttcagtccgggtttgctaccgaggtggagtcagctgccactctcccccgccgtggcctctctccctgcactgtggccctgtccacctcgaggcttcttgaaagtggctctgcttttctccattttaactctgctctgtgccctgtcttttcattttgccttgggagagtcaccgagtccctgccccacaggccacacagagccagacctttcttggctgccaccctctcctcctcctccttctcctccagagccttcactttggcctcatactcatcagccagcgccttccactctttcctattgttctgcagtcggtcgaacatgggcaggatctcttcgtggaaacgagagaactcctgaggggagtcgagaagtcaccaccagtcctgtcctgcctgctctctccagagtaagatagcccttccccagctcatccccctcgtaggggatgaactgcctggcaggaggagggagcgccacggagggggcaccttcccagcagagccctgtgaagggagaaacctcgggggctgtgttggtgacattgaagccgggagctttagggtatgcatgcttagggtgcagtgttgcagggagaggaacccaagaatgagcagaacagctcagggggtgggggcagggtgccaggcagaggggtggtgggcacaggcggacagcaggcagcccctgcagtgccttctcccgtccctcccacacacacacggcacacatcatgcaagcacagcacacgcgtgcactcgcgcacatcacacatggagtgtggcggggtggggaaggcagtggggggcacctgcagtggggccgtgacctgtggccacttcaggcccaaatatccacccttgtcccaccttctccccagcactgacgacccggggtgggtaggatggggcggggagtgggcacagcccactccgggacaacttcatgtggaacccgtggcatcctccttggggcgtggattccatcaccagggagtgtggccggaggcagctggctcttatgggcatcacacagggccccacggtcagacccctgccccatcgagtctccccctccatgtccgccttgcgtcctcagagactcagctggcatcggactgtggcagattggcagggatgtggctccttctgctgttccaaacgcccctgtgggcgggtgcaccagcagacaggccgacccagccccgcctcgagggttcacaaacatggaacaaatgaacccacagagctgcagccaaggcccccaaaacagtgtgctggccacggcggagggcactgagggagaacttctggggtaggcctggaggctagcagaggacattctgggctgggaaagggctcagagcttccaggggcacagcagggtgaggatgggctggggcacctgtgggggtccggaaactgatgttcctccccatttgccccactcaagagcggcacgaagctggcactggcatccctactccagtgaggacaccgccgggcccgtgtgagtccacgcgactccagcccgcgcccccttgcctgctcccagccaccctgccccagtcagctcggaacacccgtgaaccactcgccttgtacacgaatgtgcacacraagtcgatgaagcccacttgcagcttggggagctcggccgcyttgttccggtccatcataggctggtgggaggaacagagggcgggagaacagtgaccagggaggcagctcctggggccccgcccagccccccgaccccctcactcagatgtgctcatggagacacagcctgggacgagcctgcctgacagaaactggy

SEQ ID NO: 93467 - DNA, 13326 bp, Homo sapiens
agcctaggcaacagagtgagactctgtgtcaaaaaaaaaaaaaaaggtttttataaaagtggttaagtcccatactgcctgaaaacagaattccattttcctttacacgcacacctcatagaagcacctgcacatccactgagttatggaagaggagctatgaacagcacgagggaaatgtggatgtcaccaaagcagggaggcctagaaggagctgtacaagtctctgcgcttgctgcctgctggggctgagcaagggagacttaacagagagggacgcagctatattcatttcctagggcttctgtaacaaaggaccatgaactttttgacttaagcaacagaaatgtatcatctcacagttctggaagccagaaatccaaaaccaaggtgctggcagagccacgctccctctgacatcagaggggagggtccttgcctgcctctctcccagcttctggtggtcatcagcaatcctattctctgacttgtgctgcagcacttcaatctctgcctctcttattgaatagtattctaccctcgtgtgtctgtatctggtatcctcttcttataaggacaccagtcatattggattgagggccactagactgtagttggacctcatcttaactagttacatctgaaatgatcctatttccaaattaggtctcctggtaggacttcaatacatctttttggggagacataattcaacccataatagaagctaacattcactcaaagcatagtgagtgctggtcctgtgctactttacatggttgtttcacttaaatctgagttcctgacatgtatgcaggccccaccactcctgggatatagccccacccttggggtccctaaacccatcaccctggcctatccccagcaggttcagttgagccacttcctcccataggagaggtctccagtgcacaagctctactctggaaggatccacatgaacaaagaaatctgctagtatcctggtatgcctgcattactattacatgttatatcattcatatttattattatttctgctatgttattttgcctactcttagtccctctgcctctccacacttttgtttgtctggtggctagttccagtgtagtaaaagcccaaccctggctctgttctgaaggctctatctgaaggaagatacaccccaccccattgaagtccctctgtggttttctagcatgactccaaagttatatccatgatatcaggggaagcctgtggcacagtccgctcctaggaaggaagtcttgctagtagatgaccatgaaaactggtctggacccacagtgcaaattgtttttttccaattgcatcaccagtcggtcccacagagtcctccaggaggcccttctctttgtgatctcccttcctcctcccttctgccacagtcctttgcctttttctcgctagagaccttgctccaggtagaggggcagcccagatccttctgggtctcacagtggaacatggtcagcaccactgtatctctggctgatagtgatggctctcacagcatgacagagactcaccgtctgatctgattaaagaccctttctaccccattctgcaaggagagtgctaaaggagataaagaaggcccagatggacacacaaattgtcctgacacattggtgtaaaaagagctccttttactgaacccaaaggaagggtactgataagaaaaaaacgaggctgtggaaaaactatgcagccataaaaaagaatgaaatcatgtcctttgcagggacatgaaaggagcttgaagttgttatcctcagcaaactaacacaggaacagaaaaccaaacatcacatgttctcacttataagtggaagctgaatgatgagaacacatggacactggcaggggaacaacacacactggggcctgtcggggtaggggggaattggggtagggaaagcaccaggaagaatagctcatggatgctgggcttaattcctgggtgatgggtttatctgtgcagcaaaccatgtaacaaatctgcacatcctacacatgtacttcagaacttaaaataaaagttgaagaaaaaaagaagaataaatgaggctacagagagcaaggtcatggccactgtacatcagcagacccatgtgcaaagctggaagccaagaaacagttacttattatatgtcttcatcagctcagctgctatatcaaaatgtcacagactggatggcttaaactacagaaatgtatttctcacagctctggggactgggaagtccaagatcaagatgccaacactcccgggcttacttcctaacttgcagatgatgtcttctcactgtgtctcgcatggtggggagacagagttctggttactcttccacttcttataaggacactaatcccatgatgagggcccctcacgacctcatctaaaacctaatcacctgctaaagactccaccttcacatttaccacattgagagttagagctcaacatataaattttagaaagacacaaacattcagtccatagtagtttatgacttgagcaagtcaccccacctgtcaaaagctcagttccctcctctccaaagtagagaaattatatctaagttgacatagcattctaaagaagctgacagtaatctctcaataaatactcattgttttgactccctcgtacaaaattaccctttgacttaaaatctctggcagctgacacacaattggtgcttctgttaaaaaggcttgaaactacagcttctgtaagggcttgtttgtttgcttgcttgatttatttcctttttgttttcaaagggaggagcatcttaaactgggccaatctggtccaaacctcagcagttgcccattagctgggtttcttcctcctctgtagggcacgcatctgtaactcagtactgagaaacttcccggagatcatgcccaaaatgcctgttattactgagattaacaccatcatcaatcatccacgttccatgagcatcagcaattgggcgctacatagagcagggaggtagacatgcctcacaggtttctcatctgaacagacaggtagagcagagacaaaggaaagggcaagcctgcatcaagactctccaggcttctcccacctgcaactatctgatgatgaatcacaagcagaaattcaacaagcaggagggcccattccagagtgcagggctccctgcccttccctagaaaaatcacagaaactgtagcttttgggacaggagtcagaggtggatgtgggctctatgttctggctcttctctcattctcatttggggaaaaggggatgggaaggtgggtggatgtagcaaatcgtcaggatgcctctcatctccaaattgcaggatacaattgaaaacataggtcatttttgctacctagggcagagggtagctctactgtggagccagaggggcagcccamgtacagcaaggtcttgggccaagctgctcttaggactggctgatagctcttgccttctgaggaagcaggagtcagcaaagggcaagagaggatgctggtgagtctatcaggcaacaagtaaagaccagctgttggaagagtctgagagtggaaggaagcagaaaaatagaatggcagctctcaggagcgtggctaaggtgagtggttgttaaaagatagaagagtcactcacatttgcaggaatgtcagaagaaacaatggaggtggaaggtgtcagaaagtagggcagttagcactcccaagttccagaggtaatcacgagaataaatcttggtgaagaataaatctcttggtgaactcaggaaagaccttatgaaacttttcctcctgaatccaggagctgctgtaaattgccctgaagctctgacattctcccaatattaggtaatttgtttacttgatccaagaatgaggctctatcaaaagacagccaatgaaaaagacattcagtctctaaaaaatggtcttttattttgaaaaaagacaaaagaggtgactaagggggtctctgcccccctccactagcccctccacatccccccatcctgagatgataactggccttgggtccgcagcagggcaggagccatggaagtgaattggacacttccaaattaagaggcaggttggtctccacttcatttcgaccaatagcagcaaacttgaatgctttgtttattaggacaactctaatcatgatttatgcacatctgtacatttcaatttaaccaaaattaaaaattaccagattagttaagtgtgtaatcctgtaaattaattgtcaattagttgctccctaatgataatgaaatgcttaccaaatagcatatgatctctgaatagtgccaaataaattgattaaaacatttcttcaagaactaacaagggtcccatttgttcagtttccttgataagttatagtatggtcaggactttgaaaaatgggtctgagattggacttgcgttacgctaaggaaggacaaactttccaggtgaccaggtcagaggaatgctcacctccacacctggaccccattgcagaggtagctgaaaagacacagaatctaagtcaaggttcctatgctggaatcctattgccaaccccagctagctgtgtgacctctgctaagcctcagtttcttggtgattaaatggacatgatagtttttccaattttaggttgtggtgaggactaaattaaataagacagggaatgaaggactttagagctgtggcaggcaggcttcacccacaaggtagtcaatatatattgattgattgaaaactttaggtgaactctatcattattactttttttttcttttttgagatggaatctcactctattgctcaggctggagtgcagtggcacgatctcagctcactgcaacctccgcttgccaggtttaagaaattctcatgcctcagcctcccaagtagctgggaccacaggcacgtgccaccatgcccagataattttttgtattttagtagagacggggtttccccgtgttgctcaggctggtctatgaactcctgagctcaggcaatctatccacctcggcctcccaacgtgctaggattacaggcgtgagccaccgcgcccggcctgaactgtatcattattaataagcgcctgagcattgtctctgagcaaggcactatgcttgggggtggagataaagaaggaaagagaggaaaaggaagtagcagaggagaggaaaagaaatcagatatcatcccttgcactcaaaaggactgtaatctaattagacagcaaaagttgggggaaaccggtatcatgataacaatagccaatatttattgagtgctttttcctatgtgtcaggcactagcataagctctttatgcattaaactcctcacaatcctaaaagagagtactactacttttagccctattttacagatagaaactgagacaccaagttaagtaacttgcctaaggtcactcattaagtgccagagctacgatgtgagcctcaattctgcacccttaatattgcctgttgtatggaggggaagggggaatcagaagttctggatctgaatcattcatactatctatgcagccctaggcaaatcactttacccctcagactcggagactcctcatctgtaaaacgagttcacattctccacagcacagtttatggtaatcatgaaataagttgagtgagagtactttgcattatggctggcatgtgctgtgcatgtaataaagtttagatgcatttgaatctgccttgccatttataccagagcttctgccagctaaaaatgccccgagctctctgggtaaaacctggacactgaatgtgcttcagatcctctctgcaatggattgactcggactatttcaaacactgcatcagggaattacatatgagcaaaggtagtctacaatcagtgctctataaaatcttttcataatacattttacggatgaaacattttgggcatggttccaggcgggggtctgggaagctcagcagccatggccagccacctcaagctcaacaacactgccaaaatgcccatcctgaggctgggcacctggaagtcccctccaggccaggtmaccgaggctatgaagatggcgattggcattgggtaccaccacactgactgcacctacaccagaacaagcatgaggtgcaggtggcccaggagaagctcagggagcaggtggtgaagcgtgaggacctcctcatcgtcacaagctgtggtgcacataccatgagaaggggctggtaaaaggagcctcccagaagatattcagcaacctaaagctggactacatggccctctatcttattcactggccagctggctttaagcctgggaaggaatttttcccattggatgaatcaggcaacatggttcccagtgacactgacatgtggacacatgggcagccatggaagagctggcgaacgctattggcatctccaccttcaaccatctgcaggtcgagaggatcttaaacaagcctggctcaaagtgtaagctggcagttaaccagattcagtgtcacccgtacctaactcaggagaagtttatccagtactgccagtccaaaggtatcacagtgactgcctgtagctgccttggctctcctgacaagccccgggccaagcccaaggacccttccctactggaagatcccaggatcgaagcaatcacagccaaccggaataaaactacagcccagattctgatccggttccccatgcagaggagcttggtggtgattccctagtctgtgacaccaaaacacattgctgggaacttcaaggtcttcaactttgaactgggcagccaggatatgactaccttactcagctacagcaggaactggagggtctgtgcctttgtgagctgagccttccacaaggattacctcttccatgaagagttttgaggctgtgggcttgcttgtccacaagtgacctacacctgtttttcccacctcattttttcttgcaaatatatatggcctgtgtcactcagaggtggaacagcaacctgaagacagaccattgagggctttcctagcttgatgttgcgtttggagagcagtacccacagagtacaagtctcttccagttttctttgcccttattgttgcccagcyggggaaartacaacttgaatacccttttctgaccaaggaaaagcaaaatgtacaaagtcaaaatagtgccactaatagttgagttttgatgcttggaactgtaatcctttcagcaagacttctctttacctcaaataaaaatgcttttgtaaaaaaaaaaaaaacaacattttgagcacagattcctacatatatatatatatatatatgtattttttttttttttttgagatggagtcttgctctgtcacccaggctggagtgcagtggcgcgatctctgctcactgcaagctccacctcctgggttcacaccattctcctgcctcagcctcccaagcagctgggactacaggtacccaccaccacgcccagctaattttttgtattttttagtagagacggggtttcactgtgttagccaggatggtcttgatctcctgacctcgtgatccgcccgcctcagcctcccaaagtgctggaattacaggcgtgagccaccgtgcccagccggtatatttcttaatttaaaattttgatgcttttcctattaatattatcatagttatacacgttataaagcatactcaaaaatgaaattttaacaggataaacaaagatgaaatttatcttattcattaataatacaaaaatcttctgctttcacaaaaattaattgtcagtagtaatatttgtaatgaacacagtgtaattaactgtggttatctcttaaaatcttaatttaacccagtgaaccaaaagtcagcttctaagttcaatttccctggatttctggatgtaatggctgtctgttatcactgaaaagggtacctcacagagatctgtagatttaaatggaaaagtacattactgactgcaatttctaagtcacaatactcaatatacagtcccatcctcaaacaatgcaaaggcttttgctaaaatttccacactaaatttctatctttcctcttgtcaatggttattcttcaatactcattgattgagatgttgaagacattctggaattagacagtggtggtggctgcacaaatttgtgaatagactaaaaaccactaagttgtacagtttaaaaggggggatatttttaatttttatttttatttcaatagtttttggggtataggtggtgtttggttacatggataagttctttagtggtgatttctttgattttggtgcacccatcacccgaggagtgaacccaatatgcagtcttttatccctcactctcctcccagccttcccctgtgagtttccaaagtccattatatcattcttatgcctttgcaacctcacttataagtgagaacatacaatatttggttttccattcctgagttacttcacttagaataatggcagaataatggcctccaactccatccaagttgctacaaaagacattatttcattccttggtatggctaagtagtattccatggtgtatatataccacattttcttcatccgcttggttgatgggcacttaggttggtttcctatctttgcaattgcaaattgtactgctataaacatgtgtgcgcatgtgtcaaaaagggggggattttatgatatgcaaattatatctcttttttaaataatcatcagaagatttttgacaaatgggtcaaaacccagtgaaactgtttttttagaagattttaaaacagattagaaatttatctttcccactttcttcactataaagatatgaacgtttttataggttaacttcttatatcatttgggcaataaatgcatagaatgatggaaatgtttctaagcatccattttcaaaacattcttgttattaaataagtttcttccaaaaacaccctaactccctccctcatcggtaaaacaccatctttactaggaaggaaaaaaagtaatgtgccttatttttctcttcaaagtggctcctaaataagagactgttaacagccacttggcaccataagaaaaggtcagcaaatttagaacacttgtctttttgtaaaaacagatgactgcaaacaagaggtcttcatgatcattatttatcttggtgcaaagtatttcaaagatcctctcattttatgtggctctctcactggttttgttgttgcagttgctgttgcttgagacagggtctcactctgtcacccaggctggagtgcaatggcacaatcatgattcactgcagcctcgacttactggactcaagtgatcttcccgccgcagcccccgaggtagctgggactacaggtgtgcaccaccacttccagttaatttttttaaatttattttattttatttatttatttatttattggtgaggaataatatatttattcaatggaatgagtaaagtaaatcatatttgatatcctttcaatcttacctgttttaaagtattttttgcataataacagcatatctattgtgaatttaagtagagatgcgatcttgctgtgttgcccaggctagtctcaaactgctgagctcaagcaatcctctgccctggcctcccaaagtgctgggattacaggcatgagccgtcatatccagccagctctctcatttttcagaatcagattaattgcatctgtgatctcctgtagctcattctgcacttctgacttcaactgctctgcagcaatagtttgcttgtgagttactacccagcgaatcaatttcccaagtgatgctctccacatcctatccagcatcctcttttaattccagtggaagctaccactccatcaaatgtcattttaaacaattgttccatgagaacattgtttcttgtagagaagttatttacaattgagaacacatcttttctggcatattttctgtaactggttcaccaaakaacagcacttgttatgttttattatctaagcagaagctacatttgtacttcacccagctgtaaagcaagcactacttgatttgtttccatacttgtttctttaaagttttctccgcatctatcagcaatatttgctggctaaaggtattttcattcaatcattcaaaaaggatattttgaatattttgtatgagctagtcactgttaacaggtgctgaggaagtaatgaacaaaattaagttttcatggagctatgttcctatgagggacaacagacaatgagcaaattttttaaaaaatctaatgtatatcaggggtaagtgctccaaagaaaagttcaactggttcttgggacagagagtgatagggtgagccatttcagatgacgaagacctgtctaaggaggtgaggtctgagcaaaggcctgaatatgtggaggggcaagctgtagattatctgtatccagcagagggagcagcagcaggggaaggaccccccaggcaggagttgcctgggtgggactgacccacgggaagccagtgtgtctggaagcagagagggatggggaattgggaggaccagaggacagaaggcagcctgggagaggtcatgtagggccttgagggctagggtgaggatgatggatttcatcctgagcaagacaggaagccggggtgggggactcagcagagcacaacacagtctgacttaggtttaagatttctccagcctactgtggagaaaagactgcaacatggcaggacaggaacaggggaccaatttcaattgtccagatgagagatggactgaaatgctagtggtgagagaggacattgaaagatttggacatattttgacatagaacccatgaaattagctgacagctttggatacaggataagagagaaagaagataggacacacatggtttttgtttttgttttttttaattatactttaagttttagggtacatgtgcacaatgtgcaggttagttacatatgtggtttttaacgtaaacacttgaggaaggcaggagccacttgtggaggaggagactgagggaaagacaagcagcaatgatcaagagctcagtttggatgcatgaagctgcagaagactagagatcccgggaaggtgtcaagaaaccagtcgcttgtaagagtcaggcattacaggggaggcgtttggaatggaaatacaatttaggacttgtcagtatattaaaagcctcgtcagtatatttcttcatgcattatttcagctgtatttattgcagtaggaagaacaagtatttcccatggtcatatgcacctttttttcttcactactaagaaacctcaaaagaggcatttaagcactttccattacactaattaacattttgagagatactgcactgaatagtacatgattttaggtcagttaaaaaagattgcagacatttttattgtctttttcaaagcataatggcttcaactcttgctagccagtatatcaagatgtaacacagttaggtgaggggtgtcattaatgattatggctgtaatttgtgtttatacatctactgagcaacttcactgaaaaggagatagttctgaaagcaaaactgtcactgcggccttttctcttgtttactcatgcttgccttatcattacattcaacccaccctctctttgctgacatcgtcttaaaccatgtgtccattttgcagtgacttgctgagttaagaccagacaacatcatccataaatccactttgcctgacacgtataaactgccatccatcattgcaatgtgcaacaagggaaaggtggcaccctcaacctcttgtggaatgttgtttttctcaggagactccccttccctaacaagaaatgggaccactattcactccacatgaaggtgccagtgcctgtccatgcattatactttagcagactttagagcttagtgtctttctaactttttagggaaaataaacagaacttacaatatttccttttttttcttttttttttttttggaaacagggtcttactctgtcacccaggctggagtgcagtggcataatcttggctcactgcagccccaacatccccggctcaagcaatcctcccgcctcagcctcctaagtagctgggaccacaggtatgcaccaccatgcctggctaatttttgcactttttgtagagatgatacaatattttcttccacatatcagtgaatcaccttgtgcatcctttggagcccacattcagggctcaccctctgatctaatccttttcactgtcaaagaaggtgacaaataaagctgctaccatgtcagaatgaggattggccccagctcctgggcaaacagaattcctagaagaatgaaagatcaagttgagttcctacgcttgaaaaagaaaacattaaaaagcaattgtctcttgttaaactttaaaggctttcctatagactattaaccaatgaaaactgtgctaattttctttcctggggcaattgctattaagttgtttttgtaggctggtcaaaacctaactgagaaaaagtttatttttacctgtctttgtggccttcttagtaaaattggctattcaaagtggattaggaacctgaacttctttccttaggaaagtttcacaccaaatgtaaaaaagagagaatgatttagaaattaagttttattttttatttaatactctatctgaaactgaaaactttgagttttacttagcaacaaaataggcaacattccctcttcagaaacactaagtcaacataaggtaaaagaccttcatttctcagtaaaactgagatttgaggtggcggcaggaatgtgaatgaccctcgtaaattttctagctccaaattacttggctgctaatcaacataggcaggtccctaaatataggaccatatttctaaaacatccctttctcttattattcacagaaacccaaactgcagaacatgttcagtgaagcaaccagagctaaatcatttgaaatgcattagccagtactcgccgcaaattaatttaacaccagtcacatgtgtctgggtgattttcccctgaaaggtggcgtgagttgattggaccccaggaggaacgctgcgctgaatggctcaagatttactactaaccacacactgcacagagaaggctgcgtgttaccaaggcctccatggaattagggggaactgccaacaaaccagtgcagagcctgcaaatgtcagatagaaggaggatgagacatgatttggatatt

SEQ ID NO: 93468 - DNA, 19188 bp, Homo sapiens
atttaaatgaatcggaatgagaacattctagaaagaactggaagtattcaactacagggatgaactaaaaaacaaggcagcagcatagggttgggggaccgactatagcagtaacatatttaagaaataaacagtcattaagaggaaggacgtcattaagacaagaaactcatgctggggtggatggagttatgaagatatctctgaggaaactggggaaatgggaggatcctgggtataggccccacggatagcgcatgggattccagtgaacctcacgctgtacttaatttgcttgggattccattgagaatctggtgaaaattgtggcttcttccaacagatacgtacaagcacaaacattttgcacgcaattttaggaagttcgctgacccctaaataaatcaatttgcgttatagactgcctggtgactgaagagatctggctaaggttagaccccaaagcacagactcataaagatttcttccactccaaaagtgctttttctaacacagcagagttcaagtccttgaacacttggagggatcaaatggagagttctactatagcaggaagaaaaggaggtgatccagtcaggaatggtggctggctgtataatttttgaaaaccatctcctaatgtgtagggcatttggctggattcccagatgcaatagtgagcaattcagacttgtctctgctctgttggagttgacagtgaccaattaaaacacttagatgactaaatattagtatgaaaaaaggggagccaggatagaggaaaaaagagagtgagaggtggggtggggggagaagaaaagagaggagagaacagagagagtggggtagaggcagagatgtcagagtacaaaagagaagcaacataagaattgtgtataagagcaaaattgtatcactttaccctacttctactctgatcaagaatgtcagagcttgaattcagttccacatttacagactatttggcaaaataggaataactaatattaattatagctagtattttttgagtatttaccatgtgccttaaaaaaagataataaaaaggagatctaaaaggaagaatatggaaacagaccacgcctgcatccatgggaaagagtggaataatacagaaccccaaataaggcaaatgaaaaaaaaatgacttaaggtagaagttgagaaagtggtacaagaagaggccagctctgcacaggaggtacaggaggggtacctttcaagggaatgatgaatgaagacagcgcttctaaaaattaatgtgtatagaaaccatgtggaaaccttactaaaacgctttctggatttaatttccaaaatgtctcattctgtgatctggagtgggcctggaaattgcatgcaggtgacaggaggaaggtggtccacaggtcacactttaggaaagacaacttcaaaaagaggatgagtcaggtggatctaccctcttttggatcttggtctgggtaggttgaatgtgactttgttccatcatttggtaaactgattttggacagatcttaaactctaacaaccttggctttgaaatgacccagcttgtcaggcaggctgtgtcattggagggaagagctccactggaagattactagtgtcagaaagaaccaacttcctctatctccctactgctggggcccacataggatacaggaacatccccaccctaagccgtggcaactcgagtggcagacggtagatgaggaggactaaagaaatgtgtagaaagagatttcccacagaaacaaatcataaaatacatgtaagtgctgggaagaatagctcaccagtataatggatcaagtggtgttttcacttctttcatttttaaaattttgtatgaatcacatcttaattttaattttgttgtatagttatgtaaaatatttacatggtttcaaagtcacatctataaaataagtatgttcaaagaagtctactttttaaccctgttccctctactctcttctcttctttcctttacagaatttaaaaatatatttattttatatataataaatatataaatttattacatataataaatatatattacatataataaatatatctattacatataataaatatatctattacatataataaatatctattacatataataaatatttatttattacatatatatttttatataaatataaatatataaaaatagatatatatttattatgtatttttatatataaataaattatataatttattacatgtgataaatatatataatttattacatgcaataaattatataatttattacatgtgataaattatataatttatcacatgtaataaatgtatataaaataaatatatactaaatagaggtggggtattgcttcgtttcccaggtggtctcaagctcctggcttcaagtgatcctcccactatggcttcccaaagtgctgggattacagatgtgaggtaccatgcttggccaaaatattttttaattgtttattcttctatttaatcataagcagatgtgtgtgtttgtgtgtgtgtacatatatgtgtatatatgtgtgtgtatatatgttatatatgtatatataattgtatatatacatatatgcacacacacacaaagggctaatatatgtatatatacatatacacacatctgcatacatatttatatatgtatgtacacacacacacatatacacatacaaatatattagccctttctagaatacacattatatatattttctccaccttaaatacactttcttgacattgccactatataacatgatctctgtggagaaatgcattttgagtttgcactaaccaaataacatagttttaaaacacaggctctttataatttagtactcatatcaactttgttcaataattcattcactcaataaacatttactaaataactatgatgggcccaggggcagttccaggttttgtgaaatctaaagcccctgttaaatggctttatataggcccctctataaagcccctgttayataggccctctctttaataaaaagaaaataaactcgtgaatgcactctaaactatcagtaaccacctgccttttttttttgacagagtctcactctgtagaccaggctggagtgcagtggcacgatcttggctcactgcaacctctacctcccgggtttcaagcgattctcctgcctcagcctcccgagtagctgggactacagtagcccaccacaatgcccagctaatttttgtattttttttttagtagagatggtgttttaccatgttggccaggctggtcttaaactcctgacctcaagtgatccgcccacctcggcctcccaaagtgctgggattacaggcgtgagccactgcgcccggcccaacctaccatcttaggcgcccgtgcgaacttttccagcttcatgggtaattggcttctacacgggcctgttatgggaactgtgcttgtggctgttgcacaaagtggacaggaccccttgttttatggagcttatactgtagtacaggagagagatgctaaatatatacacttgtcataaatatataattataaattgtgtttaactcccggttatgggctgaactgtattccctcaaattcatgttgaagtcctaagccccagtacctcccaaaatgactgtgtttggtgatagggtctttaaaggggtgattaagttaaaatgaggtcattagtatcttccttaatccaataagactggtatccttataaaaagaggagattagaacacacccatatagcggggaagaccatgtgaagacatagagagtagacagtcatctgcaagccaaggacagaggctcagaagaaatcaacgccaccgacgcgttgattcagactcctagtttcctatatttctgttgtgtaagccacccagtctggtattttgttatagcagccctagcagactcaaacaaccccctaggagaaaagagtgtgtgagagaaagtattgtcagaggagtggtgaggatgctggtcagagaaggcatcaccgatggatgcatagaagctaagatatgaaaagactaaaaatgatgaactacgaggaataagcagattagcagatgctgttaaagggtgaaagaaatcaagatgcttttgcttcacttaattatcccacagtctacagaaccaggtagttctcgagagaaaatctttctaaattaactaccatagatgaaaggctaatcacagactctgaggtgctgaagagcaggaagtttaatttttaaktggaagacaaaatgtatttgatatcattcacatcctgatttaaggataagacatttctgaagaaaatgagtattatgaattacgtagatcaaacactttttagaaaaagaataaagggaagttatgctcttcctcatggctcattaaagagattatggaaattacagaacctgaatatgcaaaacaaagaaaagccagaagcatagactctaattagtcaaggataattccttatatgaattgccttagtgcaatgattctaagccccttataccacattggaaccacttgagaagtattttaataataccaatgcccaaattccattaccagaaatataactgatctcaggtggaacacagttatggcaatttaaaaagcaccccaaaagatgttaatggtcagtcaatgcatttcttccaggtaaggtaccaatagacactgaagcccagtaacaatggtgctgttaaatgatgggacacaaaactcgaagagaagttcaaagtgatagttatagcctgtgaaggactctagtgaagtcttttgtctttacttaggccatggtaagcaaagacaaaaatctgaatgacaaaataacaagtaaggttacctagatccatccctggccaccttgtgaggctttgttgctttcccactaatcctagacacaatccagctctctaaacccaacatctctctgacttagatccatagcctctttgtgctacccttctgttcattctcagtctaccctggtccatagtccagggtccagtcgtagtctatagtccaggaccagagtcctggtctatagtctagtcatagtccacagccgtagattatggacctatgacttagatccacagcctctttgcgctacccttctgttcattcttagcatttgtttggtgctttccacttctgtttaacactctgttctcaacaaaccattttcctgattggtcaaaagccctttgatgtctattcctatctttgtcacatgaatcattccctattcctctcaactgtattctctagttaataaaagatacaatttgatcctaacacatttctattatccaaatgactttcatttctgctttcttgtcttatagtcaaaaaacaacacatttctttccctgttccatatatattctatcattctcttggataaagaaaattgaactattcttattttaaatcagtgatcagaacataatctgtcatatcatatatttttcatacccagatatttattcaaccattttcctcaaagacccaataaaatagagagccacagcctatcttaaattaaaatgcaggrctttatgggctatttgacatgcaataattatttgcaaagtcttttcaccaaacatagaaattgctaatgtctgaccttggaggaaatgaactgtacaaaaaatttcaarcaaacaygatccaactgttcrcacaaaagggaggttgcataagaaattcattgtgtttctatccaaatttccccctcgaattgccacagatcagcatgtacttcactctttgccaccaattaaaatcataaatagatgagctattcagcagaggagggctggtgtgccctctccacagatggtcagcatcacatgttgcagtaatggctcgacatgccacaaaggcacagtataaaaacggtgggaatcagagcacttcagctccaattgctctatgtttagaattgcctctttttcaagatggatttccttcacaggaatggagtgctcataattcagcatttgcagaaggactaccgagcttactacacttttytaaatkttatgtccaatgttggagaccccaggaatatctttttcatttattttccactttgttttcaatttaatcagacagttggaaccaagatgatatgggtagcagtcattggggattggttaaatcttatatttaaatggtaagatttctgttttatttcattttttcctaagatttatccttaaatttgtgacttcggcataatgatcacatttcagatgtatatcgttttacttggaaaatctttcaaaaataccaggtaacttgaaacaccagattcataagtagaacttttaaaaggcacagaaatgtatatatatgtttttgtttttttttttttttgagacagagttttgcccttgttgcccaggatggagtgcaatggcgtgatctcggctcactgcaacctctgcctcccaggttcaagcaattctctcacctcagcctcccgagtagctgggattacaggcatgtgccaccacacccagctaattttgtatttttagtagagacagggtttctctatgttggtcaggctggtctctaactcccgacctcaggtgatccaccgacttcggcttcctaaagtgctgggattacaggtgtgagccaccacgccaggccagaaatgtgtactttaatgacttataagtaattcccaaacccctgtaacacatattctgtgattaagaattacttacatgagcagcgtgataatgaacaaattgataattctagggacaaattttgatatttccagtctaagtatccaaagcacccataagacattccctgcaagggaaaaaagcccccatgttcatgggaaaccagggtgccaaaataccaaatggctaccacctttaataatgtgtgagagaccaagacctaagttttttcaaagtctcttaatcatgaaytttcacaattaaccctgcgcttgagtcattttttataggaaagaattgctaatctccaattaaataatagctgtrtatttaaatatatatgcatgtttataattctttaaatacaggatattatttggtcatcgaccttactggtgggtccaagaaactcagatttacccaaatcactcaagtccatgccttgaacagttccctactacatgtgaaacaggtccaggtaagctattacagcaggctscagttactgaagatcttccaatagagaatcattacacagggttatcatctaggaactgatattatatagggtagtaaagaaaatctcatgagtgaggatgctaaaacttcataacaatcaaaattactaatgaggaagcaaagcaaaaaaaatactcaaattccattttgttatttatgaaagggtagattgggagaaaactcccccagtgattaaatatttggtgtttacttttcagaagaatataatgacttgatactaaaacaagaaacagttaactagaacaaattctcaaggaactagactaagatcttagaaatgttggttaatctgctgctaagcaactttcaaagttactataggtcttccgagtatctcacgaatgagggaggagtagacaagtcttctgtaagaaaggtaaggacttctcaatgttactatagccagtaaagactatttctaaccctagaacaatctctttaaaacatattttttctctgtacacaagtaggmttcttgggccacttcttttttattctaggtaagattctgtatgagtataaaatctttattgtgatagttgattctaagactgttttaaaaagttttttgaaacatatatttaaaaattacattttaatttataagaatgtgttatattgtacctcatcattttacatagcataacattctcgccagttgacatccttcgaaactaactttgagtaaagggtagtagagaatgtgtaaattcttaatgagtgttctgaatatgtcttttttgttcccatagaagtatacatacatctgttatatcgcttattacactaaatgatattaactaattctttatatatccgattgcctagactgggtgttccatcaggggagggatgatgcatagtttatctttgtgaaaccaaagtgtgataaatggatgaatggttggatgggtaacatttgagaccaccgaaatgttatcgtggtcaattccagtcctttccggcatgtgttccaccttataagacattttctggaaagagagagagagaaaagaaagaaagactgcatctctcggggagatttacaattttttaaggcatagtttttaaaaggctctgaaaattcctgcagataagaaataggtctgtctttgtttaacaaataagagactggtatttaatttgaatgaactaccaggtgaaaaatcgaggaggacatttaaggaaactaataaaaaattcagtagcatggaaaaggcattctggaagtagaaaggctttttctgctaggattaatgccgtctttatagcttctcctcatcctctgttttaaaacaaagattctcactgcagtggccacaagataggcatagaagtagctgctagtacacagcagtcatttgtaagtcaatcagcaaatcactggcatagcaatgatatcctttagagtttgacttctcagcccaaggaaaataagccaactgaagatccaatacaagcattagggtggtgcaaaagtaattgcggtttttgccaytactttcaatggcaaaaaccgcaattactcttgcattaacctaatacttttgcttgtcaattaaaaacaaccaaatattgaagaatgagtagggctgtggcagatttgggtgcaactgcctgagttcttaattagccttgagtatattgatttctggaattcaatgaacctgaaaatctgggaaaaaawttttttgagacagtgtttctcaggctcaatttaactcaatttttcttatttctayccacttctaaacattacatatagcctgtgtcttgtctttttttctgagttactcataattttcatggggaatatgctattctattattcatttctgatcttgatagttaaccacttttcaaatggacggacactttgttgttgcaggaagtccatctggccatgcaatgggcgcatcctgtgtctggtatgtcatggtaaccgctgccctgagccacactgtctgtgggatggataagttctctatcactctgcacaggtcagctttgctgcagtttctgtagcactggaatatgacagtttttaatacagaaagtcttgtctaaaaattaattttagtgcagttttagtcaatgaataamatgtgcttattctattctttcatagacaaaataacaaaatgaatagaaaactaatattttgctttaagataatagcctaattagctcatagctatttccacttttcaagttggaaatgtttaactgattaatgacttgctaaatgtgcctctgggtttccaaaatgcaataattattttgataactcataaataagtcgtctaaaattatacagcataaggaaacatttttgcatgcacattcccttgctttaaaattaactggaagttttgagmatcatcattctccttgactgcatcagtttattcagtaaaattatgcttccttcttcgaatagccaatgcttttgatttcagtaacatatattccagctttatagagagcacaaactttttaattaaaaacattctggaagcaaacttaaatttgaatgttagtagatttaatgttagtaggtttcttaatgtttagaaagatctagaacttaaaggttactcacagttgcttagaaattgggttgtttccttctcttctttcctgaaatactttgtcattaaaacaatcctgagtaccaatttagccataaattaggtgacttgaaattagatttgcaagttaaccttaaaaaaatactgtaacatatgccattattaaaaagttttctaaaataaaaaaagtcaagatctatcacatattccacttgktagagtagtattggataatataaaaaacamacaactaaaggaatttgggtgtcttaaaagtttattctaatgagactgtgacctgtatgccttaatgtatttattgcccaacccaaaacaacaacataaaaaggtgctataatgtaaaaaagttagcattttctatttacagacaattttcaaagtaggaatctaggtcagtttcaccttttctctatactgtattcctgcctccaatgaccaaacctgaaaaaatatgtttcttctaagaaaaaaattctcataactcctttttagtttttataactgcagtattttcttcatctataaaattttactgagtgtgtgcttcttacctttacattaccaaattcttgtttattcttcttccacattggtatcccacttacttcttctttcaaagcctcatttctctgtgttccttagcatttatataaccaaatttcagtctgattatcaggaacaaaccattcaaggattcctagaactcaatactgctaacacttttttttttcaatgacatgcattgcttggattttaatatttttttatgttttttgtgcattgctgtttttaatccaaagtgtataacctataggtcaattcccctgttctctattttctgtgtctcaaaaaaaaaaaaacaaacaaaacaaaacccaaaacaaaagaaaaaaaaaaaacaagaaacaaggacttttgaaaatctgtgcaattaaacccaatgaaaaaatttgccccagatggaatgctcatgcgcttttcatctggatggtagctgcgtttctactgagttttcctcaagcaaagaaaggttgagagaggaggcacatagggcagggcgtgaaaatatatatggttcattcttgatcattctggatattagtaattcccccaaacttgaatttcccctactccattaaaacagttattcttatttaatggatgtcaaaatgacttcctttttaacatttattaaatctcagtatatagcactggttaaatttaatgcattgagaaatgtagaaatctctgttaaaacttctcaaatcctatggggtatgtggaaacaacattttgaaaaaaaagattctagaatcatgatgctatgtcacagttagaagattcttctgagaaggatcatctgatgtcaccccctctaattttgagtgatccagtttctttgctttttayrcttgtatctattcttccatcrtagactgacctggtcatttctttggagtgttttttggttgattcaaatcagtgtctgcatctccagagtattcrtagcaacacattttcctcatcaagttattcttggagtaattggtggtaaatatgatcacttacctttagctgtgtcctttgaaagctttrgtttcattatgtttaagggtatcagattgtccccggtaatcaactttccaatttcagaggtaattctgtgaagtcactgatactaaatgctaccccgggagctgacgtggtacaacacacctctcatagcctccatgtacaaagtggcacaatctcagtggcgtaaatgcacaattgcttcatgaggtaggcttttctgmagtgaaawtagagctaagtctaactyccaaaccatcacttcagacagtgtgcttgtgtcttgcgtgagggaacttaatgactctgagccctgcacactgtgccattctctctgaaacatgtgaagtgactattacatgattacggactccatttagtagctgctttgtattcctgaagcagtgttcaccatgactcagtttccattgttcagcaccaccttacctttcaaaggctaattggctatggcaattgaaatgttaattgcaagyacctagatcagtgctctgtctaaaaagcgggttgtcagtcagtgccaccaactccagaacgatccttctggactagtatgaataatgaaaacaccgtgggcaaacytgcatttttagttactgcctaaaaaaggctttggaaaatggatagaacctctgtgtctaatgccctttgtcattgaaaactgtggcaaatctttaatgcagagaggaatgatcctcgaggggctcaagggcacacagtcattgtcagtgtctctttccaatcctcaggcatgctggtggcagaggcctttgaacacactccaggcatccaaacggccagtctgggcacatmcctgaaraccaacctctttctcttcctgtttgcasttggcttttacctgcttcttagggtgctcaacattgacctgctgtggtccgtgcccatagccaaaaagtggtgtgctaaccccgactggatccacattgacaccacrccttttgctggactcgtgagaaaccttggggtcctctttggcttgggctttgcaatcaactcagagatgttcctcctgagctgccgagggggaaataactacacactgagcttccggttgctctgtgccttgacctcattgacaatactgcagctctaccatttcctccagatcccgactcacgaagagcatttattttatgtgctgyctttttgtaaaagtgcatccattcccctaactgtggttgctttcattcyctactstgttcatatgttaatgaaacaaagcggaaagaagagtcagtagagtggtgcctagagttagtgctctgtrtcacagatcacccttctccatccaccagtagagccacagagtaggcacagaccagaggcttctaatccgacttcacagaatagcggcacaggccccattccccataragatgtttagtttggccttcgcactggtctttttttttaatccttcagttaccaatatttagatacaagaatatttgacataaaaatcggaagttctgtatttcttgaaaaatctgatagtatgacaacacagagcctgcatccccagctggagacaactgaccagagctgcatactaacartccccaktaggaggcaaggactccattttctcacagtcttcarcatcccagcaggagccccactatgattcctttatcttcttaaggccaggctgcatctgattcctgttgacattttagtggggaccacagccatatccagtttcagttttcagatgaggaaatggaagcctatttaggtaaaagaacttgcctggagtcacgccaccttcagagcaggaattagaacccaaggcttctgacacatatccccattacactgtgtgtttgagtgtgcacacatgcacatgctttttgtttgtatgtttcctttttagaaccagggacttgctctgttgcccaggctggagtgcagtggtggatagcggctcactgcagcctcaaactcctggctcaaatgatcctccctcctcagcctcccattagctaagactacaggtgtgcaccaccatgcctggctaatttttgaatattttttagagccagcttcttactatatttgcccaggctggtcttgaactcctggcctcaaggagttcccttgaggatgttccacccatgtcagcctcccacagtgctgggattgcaggcttgagccattgtattaatagttggcctacactgtcttttgtttcttcatttacaagaggtaaaaatcagtaagaatgaatgctttcatttagattctatgatgactgccatataaatcagctaccttttcagaaatgacattgaaatactgcatcctctttgacttataccccacacatacatgcagggtctaggtgggaccaacagtggctccagatgtatatacacacgggtccagggacaacagaacaggccaggctacagtatggacttgaacctctgcttcacttctggtctctgttttacagtagtgctcaccaatatttcaataaattctactgaacttactctaatagaacattattcaacccccaaagacttatctcttcactatgacatctccatactttatttttaggagacagactttcaaaaccagagaaatcaggtgccttcctcaaggtcatgctccaacccaggccaactattaaatgcttgcatctgttagctggattagtctctatgtatactgaactgtgatgaaaatctatagctttgttttagaaaattattgttgatggactattaatattatattaacaatttctcagtaagtgtgttttttcctcattgaatctaggaatgctgggctttaagttgataactgtgtcatttcaatcaagtacaaggattttgaggcagattttgctagatatcttagtaatcccccacaatgttttatgtaactcttctcagaatatcaatacattaattattttagatgacatattaaataatctatgaatattaatgaaaacaatacagttgaagtgagtgttgtttaacatgatagtagctgaggataacaaacctcaaaaaatcaaagtattaattactcctttccaagtatatgtatagagcatgtgtcattgcttttataaaacgcacttaatagctttctttctaaaaggcaactgaactttctaaaaggtaaataaactgaacttgatattagtggttcggtgattccaaagcaaaaagctgagggattaagaaagaatagcttaagaatgaaatttgtctcatgttgctgggacatttgggatgaaagaagtagagaagaatgattcttcaggtgatgaccgttgctcattggttcagtcccaccctatgtcccaccatgctgtacctttagatgccttcacatttcatgatacatttgtgtcattacatcttccacacatcagagatctcattcctgtctaaaagccctttgccaaatttcacataagataatgttagtcttgaaggattctggtacatccccttcatcctagtacaatctcagcctgctttcagcaaggcctgaggaaaccggcattaatagccagggaattctgcagcaatgattgactctaccataaatccgttctccgtttccatggagaaagctatcttcagccaccccatggtgctgtctgttgggcaacacattaccctcagaggggactgggatgaagtgtgggcttgttttctataattaatccccaagaactctgcccctatcttccataaaaaccccagagtccccatgggagtagatttccctctttattctagttgaagtctcctggagggatccatatggtggtaaattgtttttgcaattgaaacgccttaggcagcaagaggaatcgtttttcacagccttggagaaaatgcctgcccttaataatgatggaaaagactcttctgtttccaatttatttgtcagaagtaagtggaattgagctcattaaatactgttactataaccatatattcaaaatgtctacctatctacatattcaggagaaaaatgtcaataccatgagcttttaggatgagaaaatctagacaagaaaatctgactcaagagaaaatctgactcaagaaactgtccaatcaaacctacatttggaaaaaaaatacaaaataatttattattgctgaaactagctatcaggaagaatattagttcctttcctttgacaacctattgattggacatctgcctaagaaggttaagttggtgccttctttagacatatttcattataaaacagatggtgattaaaagaattgttataagatgtccttgaaactaaaagtcaaatgttgaaatgctttacattttttcaaaatttttaaataaattcaagatcaaattggtacatacatacaaaaatcttggtttaagaaaaagtcaagtgacttggttctaaaaatgagattcttttcttaagtattttaaaactgtatattccagcactcttcaattgaacttttacagtgatggagatgttctctatctgtgctgtccaatatagtagccactggccacagatgtttattgagctcttgaaatgtagctgatgcaactgaggaagtgcattttttttttttttgagacggagtctcgctctgttgcccaggctggagtgcagtggcgcgatctcggttcactgcaagctctgcctcctgggttcatgccattctcctgcctcagcctccggagtagctgggactataggcacctgccaccacacctggctaatttttttgtatttttaatagagacagggtttctccgtgttagccaggatggtctcgatctcctgacctcgtgacccgcccgcctcagcctcccaaagtgctgggattacaggcgtgagccaccaagccctgccggaaatgcatttttaaccttcatttacttttaatttacatttcaatagccatgtgtgtctagtggctactgaattggacagcacaaatcaagtctcacagtgattttccttgaaaataaaacccaagtattttgtatattgtcacttttgccatgttcctgtgagacaacatgaatcagcgttaacggctctaagaagttaacagatattgctgcattttccaaagggaccctctgcagacctggattctctctctgcagctcccttctctctcattctgtcctgtgagcaatagccgccttggtgtccctggactctcagctctgttgcctggaatcagagagtctgggttcaccctccctgcaccatgttctggaaaccctctaaggtacacaatactagcggggagctttacccagtccatgaccacattctggatggctggttggctttctgacgaagcctccctgcttctctgggtctagcacacatcaatgcccaacacctgtacttctgtggctattcataaagtcttccaaaaaggaccgctcgtgtccagttgcccctgaggattttgccctcattgatgggctgtcctaggcactttggaaatggcaaacagcttctaggatgaatttctagatctcaatattgccaggaaactaaaatgggggtctaacttttcccctccccttacttcgaatgctttcagatggtgatttcactctgaaggtaatgtggtgccatttgccaattgttaaaagtctatttttttaaagttaacagtagaaaagatctatacgaagcaacgactccagaaatttctgccaaatgacagaaattcacgagaagattctaagacttagaagtgcttcattttcggctctgtaaaggacgaatgcagtttatgccaaatttgaggcaggtctggtgtggagtactaattactgtctgctatcctttgagggagagcacagtaatgactcagatgaaatcacttctcatttcttttggcagcatagaagtaattgctctaaaggaggggaaaagcttcaacgattaaggttataaaagttagcataaaaccgattgtcttctgttctgaatttttaaatttcttagtttttctttttttctaatgttttgccatgtgatttctgaagagaatctgtcctcagttcaaaaaccatgatatttccccaaagaacaatatgttctgaaggagctgccaggacaggggcaggtaatgagtgaaggcagcagctgcggtcccgccgaacgggactcctggcgcagcgcggggaggaacgtaggcgctggcagcacagcagcccgtttctggcgctggccaagtggaaactgaagcggcctccctgggaggatctgggtgcgctgcagggggagcaggccatctgtgtgcctggaaaagaaacccagcactaccgaagacaaagaagagcttctttactctcgcactcacctacccctgtacgtcaactgagccgatcacactctaattcctgttcaaagagttggctttttccaggattcaggctttgtctgatgaacagcatggaccggattgtcatctgtgctcatacatcctgctgctaatagaagatgggcactatcttccacccgccccgccccgccccgcccccttgcctccaggctcagtaattctgcatcaaaaacatttctacataatcattcctttctttttttttttaagcaattgttcaaataaaaaaatggtagagctcttgctatatttctagatgaaaactgcattgacttaacaaaataaaaataaatgttcctgtctgagttttggagatgtgtgtgtgtgtgtgtgtgtgtgcgtgtgtgtgtgtatcttattctcttagctttggaatgctgatgccctgctcaccctggccaagcaagaggttgcgccacaggtccacatgtggatcccagaggaagtcagaatgcaggtaggcaggtgccaggaaattcaaaggcagatcgatgtacaaaggccttcgtggagtttagcaaccagcatcctggactggagtcatcagaactacattctagcctggccctgcatctaaccactaaaactccagaaggccatttagtgttggtggcctcagtttacccagttctcaactgaggagtttagtatggggttaaaatggaaggttcattcacggtgtgatattcttcaactctgagggtctcattcagtccaacatattgtgctttgtctctccaaccagctcctctattttgtttgctctttgtgaagcactatcttcacagaaggctttcagatgtattgttaatttttttgtgaagtggagcaagaaggtgataagaccctggctaatgtgttttgatactgttttaattttagttacatgcaatgaacaaggctataacttctacaaagcactctgttttgaaatgtgctactttattaaacaattttggaccagtctttaaaacattcgattctaattagaatctgaattttatagcaataaaaaagtacatggagagataatttaactgatgttatggggcaaaattattaacgtgagaatagccatagacttcctgctatgctatcttgcaacagaaatcctataattaaattccaactccagttcccctttctcaacatcctaaagaagaaattcttgctggaagagatactaagcagatcacataataataggctgaatgagaagaaaggaaggagagggaaacttg

SEQ ID NO: 93469 - DNA, 44907 bp, Homo sapiens
  misc_feature (1)...(44907): n = A,T,C or G
gtgaccccaggaatgtctgttaccttatctggcccttaaattctgtcagatggagaaagattaatatcttaggtcctcttttcagtaaaacgttgtatcaaaatctaagactatctgataagacatgggagcccagttctggcttcatgctgatttaattctcccatgtagcatgtgtaaacatgtaaatgctagctcttagcctctctgtgtttgaattccttcttctataaaaaggagatgctctctagattccttctctctgggcagggcatctctgaaagaaaggcagcagccccagtcaggggcttatagataaaactcccatctccctgggacagagcacctgggggaaggggcacctatgggtgcagcttcagcagacttaaacattcctgcctgccagctctgaagagagcaacagatcacccagcatagtgcttgagctctgctaagggacagactgcttcctcaagtgggtccctgaaccccgtgcctcctgactgggagacacctcggagcaggggtcaacagacacctcatacaggagagctctggctggtatctggcaggtgcccctctgggacaaagcttccagaggaaggaacaggcagcaatctttgctgttctgcagcctccactggtgatacccacacaaacagggtctggagtggacctccagcaaactccagcagacctgcaacagagaggcctgactgttagaaggaaaactaacaaacagaaaggaatagcatcaacatcaacaaaaaggacatccacacagaaacctcatccaaaggtcaccaacatcaaagaccaaaggtagataaatccatgaagatgaggaaaaaccagaacaaaaagcctgaaaattccaaaaaccagaatgcctcttctccaaaggatcacaactccttaccagcaagggaacaaaactggatgaaaatgagtttgataaattgacagaagtaaggcttcagaaggtgggtaataacaaactcctctgagctagaggagcatgttctaacccaatgcaagaaagctaagaacctggataaaaggttacaggaattgctaactagaataaccagtttagagaagaaaataaatgacctgatggagctgaaaaacacagcacaagaacttcgtgaagcatacacaagtatcaatagccgaatcgatcaaacagaagaaaggatatcagagacagaagatcaactgaatgaaataaagtgtgaagacaagaatagagaaaaaagaatgaaaaagaacgaacaaagcctccgagaaatatgggactatgtgaaaaggccaaacctatgtttgattggtgagtctgaaagtgaccaggagaatagaaccaagttggaaaacacacttcatgatattatccaggagaacttccccaacctagcaagacaggccaatattcaaatgcaggaaatacagagaataccaaaatggaagagcaaccccaagacacataatctttaggttcaccaaggttgaaatgaaggaaacaatgttaaaggcagccagagagaaaggttgggttacccacaaagggaagtccatcaaactaagagcacatctctcttcagaaaccctacaagctggaagacagtgggggccaataaccaatattcttaaagaaaataattttcaacccagaattacagatccagccaaactaagcttcataagcaaaggagaaataaaatcctttacagacaagcaaatgctgagagattttgtcaccaccaggcctgccttacaagagctcctgaaggaagcactaaacatggaaaggaacaaccagtaccagccactaggaaaaacataccaaattgtgaagactatcgacactatgaagaaactgcatcaactaaggagcaaaataaccagcttagcatcataatgacaggatcaaattcacacataacaatattaaacttaaaagtaaatgggctaaatgcctcaattaaaagacccagactggcaaattggataaagagtcaagacccatcagtgtgctgtattcaggagacccatttcacatgcaaagacacacacaggctcaaaataaagggatggaggaattatttaccaagcaaatggaaagtaaaaaaaagcaggggttgcaatcctagtctctgacataacagactttaatccaccaaagatgaaaaaagataaacaagggcattacataatcataaatgggtcaatgcaacaagaagagctaactatcctgaatatatatgcacccaagacaggagcacccagattcataaagcaagttcttagagacttacaaagagacttagactcccacacaataatagtgggagacgttaacaccccacccccactgtcaatattagacagctctataagacagaaaatcaacaacaatattcaggacttgaactcagctctggaccaagtgtacctaatagacatctacagaactctccaccccaatcaacagaatatacattcttttcagcaccacatcatacttattgcaaaattgaccacataattagaagtaaaacactcctcagcaaatgcaaaagaacggaaatcataactaacagtctctcagatcacagtgcaatcaaattaaaactcaggattaagaaattcactcaaaaccacacaactacatggaaactgaacaacctgctcctgaatgactactgggtaaataataaaagtagggccgaagtaaataagttatttgaaaccaatgagaacaaagatgcaacatattagaatctctgggacacagataaagcattgctaagagggaaattttagaactaaatgaccataggagaaagcaggaaagatctaaaatcaacactctaacatcacaattaaaagaactagagaagcaagagcaaattcaaaagctagtagaagacaagaaataactaagatcagagcagaactgaaggagatagagacaggaaaaacccttcaaaaaaatcaatgaatccaggagctggttttttgaaaagattaacaaaatagatagattgctagccaaactaataaagaagaaaagagacaagaatcaaatagacgcaataaaaaatgataaaggggttatcactaccaatcccacagacatacaaactaccatcagagaatactataaacacctctacgccaataaactataaaatctagaagaaatggataaattcctggacacatacaccctcccaagactaaaccaggatgaaatcgaatccctgaatagaccaataacaagttctgaaattgaggcagtaaataatagcctaccaaccaaaaaaagccaaggaccagacggattcacagctgaattctaccagaggtacaaagaggagttggtaccattccttctgaaactattccaaacaatagaaatagagggactcctccttatctcattttataagtccagcgtcatcctgataccaaaatctggcagagacacacacacaaaaaagaaaatttcaagtcaatatccttgatgaacattgatgcaaaaatcctcaacaaaatactggcaaactgaatccagcagcacatcaaaaacctttttcaccatgatcaagtcggcttcatccctgggatgcaaggctggttcaacatacacaaatcaaaaaatgtaatccatcacataaacagaaccaatgacaaaaaccacatgattatctcaatagatgcagaaaaggcctttgacaagattcaacattccttcatgctaaaaactctcaataaactagatactgatggaatgtatttcaaaataataagagcagtttatgacaaacccacagtcaatatcatactgaatgggcaaaatctggaagcattccctttgaaaactggcacaagacaaggatgccctctctcaccattcctattcaacatagtattggaagatctggccagaggcccaattctttgctgagttttgggtaatggatgtgaagtatcagctcagaggacgtaggggatcctgtttcctgtttttcatgcttttctgggaattctgaactcctttccatcttgaagtctcccagatggagtcctcagaagtaccaagccttgagttttggggattgtttaaaagtggaggagtcctgacttattcttcctcagacaatgggtctatcttaagggagggtctatcttaatgggtctatcttaagtgggtgaaacagattgcacacttaaaaatgtggggtcatggtggaaatgagggtgcaggggaaaatgaagaagcattgtcatcttcaggattacatgttccaagctgatccctgcatttctctagcatttttctggactgctttttgctgacatcagtcaatgcctggaggagaagtctacagaggaatggaggtagttctgtcagatacttttttaaaaaacttactttgtcctgtatacaggctgctaataacacagcgtcatcatcagccatgagaacccccttttcttgtccacactgagcataaaggatctcctattgtgatgttttcctcttctttaaaatttaacttgaggttcattctagccttattttcactgcatgaaaagactgggggatcagtggggtcacacatccctgaatgatgattcctgttattcttgagagggcttgcaagtattcaaccctcaaagtctatgataaatcaacaaggaagtttcccmggaacacccagggttagtctgtggttaggcagctgcctgaataataatttttcattattcatgaagcagctttaatatccagagctaaaaggatcccaggctgccccgatgcctgtaatgtcaccattgtttcttcctttggacaacggcattgaacacttctgagaagaagggaaccctgcctgaggagggtgatccatgaaaccccatcagatactcagacatcagaactgatttatcctcacgtctcagctttttggctaagatcaagtgtataactgattgaccagagatccacagacagggagacagggagagtgaggagcccaggaaagtattgaagggctgcccagcgtgggtgctgtgcagtgagaagtgggtggagaactgtttgagagctgtaggtcctttgtgggcaatgagtgctgagaatttaggtagggacaggtatgaaaagcagaaagaaaaggcagggaaggagagagcaatccatctctaataccagcacctttactgttttgctaagggagagattaactgagttgttacggaaagaactggtcagggtaaccccataattcacagtttattttccctttccgaacattgcagttgcgaactttggagatttggcaacatcaggcaaggatgctgccagcaagaggagagatccaggacaacygtgcgtgggtcatcccttgctcagatctcacagcaatcttgccttgtatggcactggaaaaatagagcctctttcttcagatgaagtcttctcttagtgcctcttcattatctaagctgtgcactccatgaatgactatcatggctgctcacaaagtgtttagacagctgtggggccgtgactgaaaagcacgctctcagggcttgtgacttagcagaggactcactctcctccctgaaagctcttggctgtctgctggcttgccgcttcctgaagtttggggtcctctctgaatgtcacacagcatccctctcctccactatttggataatttagtaaattctcaatggagcaaacatggctccctttaaacacctaccctttgccctcaataaaacagtttaagagaacagaaatttctcagcagacacttgtagttaaacaaagcatttcacaaacttctggaataaggatatttatttatttttcattattcgtgaaacagctttaatctgaaggctgatgtttggaggagaaagctcagttgcaacctggcatagctcacgctgcatggaagctgaagatgtcacccacgataaacatgaactgctgtgacaatgggaagcggaaggtgaagaattgcctctccaagcagggtgggggtctgaatgcgtgagaaagggaaagatgcatttgattgtgtttacaagattcattcacagcacagcaggcagtattcacactataatactcaccctaacacagataatttgattttcaacctggttatcatgcattcagacatagcaatacatgaaaatatatgctttagcagtgcattttaaacaaggttgcacactttaagtcggaatatattagaggtgagtgttaaagttagcaattgtagaagtcctagaaatctccattcagcacatggcatgtgttttgaaattactaaaaaaaaatgttatrttatgttccagctgttgaatatatatacacacatgatatncagtgaaaatgataaacttggttgctccttaaatttttcacgatttgaagaaactttaactttctttagactcctaaagaaaaatggaagcataactccatccacacacaytgaaattataactattactattattgctgagcagaagataacagattatctggcccaatccctcatgaggtgtgtgaggaaactgagttgagagccctttggtgactttttcaagatcacacaattaatcagtggagagttgatgctacattctatgtctcctgtatttgttttttctgccttctcctctcattggaattgaattaagtaaaatgtaggaaatagtctaccttatgttaaaatcagagtttttctggcacatatggagcaggtggggattcctaccaaggctttgcccatcctggtctccggtcctcagccaacatgtgtgaaagatcaattcactgcaaaggtttctcctccattgccctcattcttctcccccttaygttattagtcaataaggaatatttcttggctatggggaagtcataatggatagcattggtcttggaacaccttggtcttttaatgctagagagtgaccttctgagccttggtatgactcccagagaaataccaagttaagtttcagtagattgatttgtcttttcattggtgataaatccctttgtcaagtgtggtaactaaagactttgatttgggccctgggtcaaacagtgacactccataggctgaagacaattgctccctgatgctagtggaacaaatggatacctgggacacattaggatagcaggcaactccagaaggaagcagacaactagaggtgggaggaagacaaacatatggggaggcagcctcaactctcctcatgcaaaccattcagggggctggaaatgtgtccttgcttttccacactgtgccattcccacatttcttgcacatcacatcagcaaacaattttgcttacagagttctgagcagttcaaagtacataggactggaaatcacccaggggactaggatagcccctgaagtatgtgagaacccagttaacaagaggtgatgactcaaaacctcccctctccaggatcctgagtaagacttttaggagaaagcacttaggcttcctgagaaagagttgcctacatgttggaagcatgtactttagaattgcctcatcatgaaatgtttacaaatgaattcatttctaaaccgatacaagcatgggattccagcagtctgggatgcagcctggtttgccagctctcaacccagatggccctgattcacagcctgtctccagcamttgctggcaatgtgacctttgagaagttacttaacctctctgtgcatctgatttttcaactgtaaaactgacatatctcccttgtagcctggtgaagattaaattacttaattaatagaatatacttagaatagtgcctagcacgtactaagcactcagtaaaagattcagttccatttctgattctgctttgatgcaaacattaagccagaaaaaaagatgagcgattcccttgttgttactcaattattcataaattgtttyaagaagcaggctctgatatttcttctggcaccacccctcaaaataacctgagattctctagaatggcatcagctgctgagaatatagggaatctgtgtattgggaatgagtatgctgtttgccttgcaccacatgattaattgtgtttaaagaccagttttattaggaccagaatggtgacaataaaattaaaggagcgcagattcaacatcwccttaaccaaaaggaaaaatgaaaacgccacacacaaacacaaaacgcaaacacacgcccaaatgcagaggcaaaaaataaaacctttcccctttcctcaggctttctccataagctgagctctacccagacaaaggcgagaactgctctgtgtaaaatgatgatctccatggctgcttccacagaatgccctcatttttctagaatccaaatgctggcttagccaagccacagtctgctcccgaagaaggattgctgcagcccraggtctcaggaggtcagcagcgggcccaggctcacttgggcttaggctgcgctcctgcagcctccctcccatcccccagcctgggcaaaccttggcagactccaggttgcaagcctgtgcctccccactgatgtggaaatcrttggactcagtggtggtttaagtgtgttgttgatgctttcatcaaagcgtcgtgctcccacctcatgctaagtaaagcagctggtgaatgttatgtcgtgcactgcagatggattggtggtggcaggcccagagctcrccacatctacttaaacaggtgtttgattctgcattttccaggtagccagaaggaacctgattattcggtgagagtaggagccacgcgggagaggaattgctccccagcattggcaaggcaactagccagccgcttggctttaattcatctgttcaccagacatggtcttaaagccagaatatttccttttggggcccgtgcttactttgaattttagtggacaataaggggattctgctcccagctcatactcttttgttgagtgtggtcttttagtctggggtgggttagaactaggtcaccagaaccagtggccactgcagtttgcagtcaaggcatctctgctataccagccctgctaccaggtacagcatgagaagctgaagttgcttcacagtgttgtatttctccagaaccacacatccaccttcatgaacagagggcagtgtgagggatcctttctagtcaccgggaatgacagacatmatcaacagttagccaggaaatcacaaataaaacagctacccctaagaaggcagaaaccaaaaaagcatcaaagcagctttttgcagcaagaagatccacaagtgagttttccatacaatctagagcaaaggaaactgaaaccctccatccactggggctttttatgaaatgagcctcaatgccaatgcagtgtacaatgatacttctaaaatgaacccaagaaactcaaaagactttaacgggaaaaaaaacaagggaaaatagcacaatactaagaggaaaaagcacacaactgtagaaaccaagactagaagaaaccccggcaaggacttcccaagagaacacaaaggagaaaaagcaagctgttgcactccccttgtagcttggagcttacaaatccccgaggaaaccctgcgaataaacagggcactctaaaacgagctacaagcggggcggtggaaccatttctcagcagtcttggagtgaattgagtaaatctgtcacagcttataactgggggggagtagtgggaagggccctcctcatggggccacctgccccagagctggcactgcggggctgctgctccttctcttggctcctgtgaccctgcagacttcagggggcaggaaggcagctgtcagctttcacatggcactcgctcctggcaagcaagcaagtccagtggcagccaaatccttgtcatgttccaatcagccccacaatggtggagcctccactgactggtggcaggtcacaggagtgtgggagctcatctgcctcccacatctgactccctaaaccatactgcctcccctcctgaaagcctgaagaagcctatatagggaatttcttgtgcagagaccctctacacaacaagtaacagacatcacaaggatcatggatgggtgtcttcccatgatagtttacttataatttaccttctaaattgtcccaaacgacaccaaagaataataaaggcacatatacacatgtgtgtccacattttagtctggttaaaatggtttctaaccctcggcactattgaaatttggggtcatggakgggctgccccatgagttgtaagatgcttagcagcatccactaggttgccagcagcamccccaccccgagttgtgacaacagaaacatctcccgacattaccaaatgttccctgggtggggggtgkggggcataaacaattgagaattgctaggttaaaataaagatataatatagatgtgtgtctctacacgtgtataataaaaaattatagagagaaatggagagtctaatgttttcagaaactgaacattatatttagtctgggcaagttctgaatgmtggaagccagggtaggcagtagctttgctgtgatagtcctggcatggttgaaatttattgagggcatcccaggagctcaaaactgtgcccaggttcagtgcagtttcatgcatgaactcatttggtccttattattatctctactttatggcgagaaaaatgaggctgacagaggttaactaacttttctgagtctgtacagctaaaaggcgagagagccagaatatgaccagtggggtgactgttagccgctagaattgtgcccccacaacatgatagccacgaaccacgtgtggccattgagcacttggaatgtgactagttggaactaagatgtgccatgaatgtaaaaatacactcctgatttcaaagacctggttcaagaaagataatgtaaagatattttattaatgtcttatgttgaataaatgttgaaattatattttggtacattggattaaataaaatatattattgaaaataattttctgtaattctttttatgcttttaatgtgtctagtaaacatgtttaagatctggtgtggtggctcatacctgtaatcccagcacttggggaggctgaggcagagagattgcttgaggcaaggagattgagatcaacctgggcaaaacagcaagacccaactctacaaaaaataaaaaagtaattagtcaagcatggtagtgcatgattgtagtcccagctactctggaggctgaaattggaggatcccttgagcccagaagttagaggctacagtgaccactgcactcaagcctggacaacaaaataagaccttgtttctaaaaaaataaaaaatatgaattttcaaaatacatatctggtttgcattaaatgtgctagataatataatactatctccccttgcatcattttaaagaaaggctaaaaagaaaaataatgtatgtgggccaggaaagagatacccttagcaatgaaaccagtattatcatcttatatacaattaaaatcagataaatacttttggaaattaagttatgtgtaacgttcataaagggccaagtgaattcaaaattaaacatttcaaagtgtttatattcaaattcatatgtcaatcaacacaattaytctctccactggcatcaagtcatgattgcttggttccaggctcagccctgagtggacctgcagctgtgacagcttagacatgcccttctgtccctcttcctaatcactccactggccttactcgccacctatgccttgtttctgtgcattcagttggtccaaggcaaaggatgatttctaatcatcttacagttccagatactggcctttcccgaaacctttacttggatttttttttttttaatttcacacaagttgtcatccagaatgcttctccgagtgctttctggctgcctgttcaacccacagtgccccttgtgcctcctccccttatctagagatactatcctccgtcaaattcccacctcccttcaaggccagccacatgctcagtaggtctcatgttggtrgcctgggggcctgagtccattttctcacctcctatccatgtgatcatggactggatctgagaaatgtgcttgataatattactgacctggtagggttgttgtgaggattaataattaacccatgcacaacccttggaatactgcctggagcatgctaagtgcttcataaactttagccactgacattttcagttgtctttggatttaacataaggggccacatcttgtgcgtgaggatattcttgtttccatctgacccatgtacctgtgcctatccttcctctcaacaattggtgaggtcaactgcagacacttgagcttggtggcaccccccagggatggagcaggtggcacagcagtgacagaacagcagcaggaggaaacctgcttctaccacatygttattaaggctgatgaacaactctgatcatcacacagttgaaaattatgggattcaggaccaaagctaagggatttgtttcaaatcggtaaatccccacaagaggaagtctctaaagcagactccaggagagcacacccagaaggtgcatgcaacaggctgcaaagggctttgtttgaaaggggctgggagcagggaagcggggacggtggggtgggctgatgctgcactccattccagcttggtgctgagccttacaggatagaacaaaagcaggtgacaagctggagacccagggaatggcaaaacaccccctactctggtcagtaattggagatggatgaaagtacccgctgaataacctcactttgcaacttttattcaaaggtttgacaaatgacaccagcaaagttacaagaaagtgattaaaaccagcccttgcaagaaggcagagataaccatcttggggtttgagtctcctttagttcccccatccaatcccctcacccccaccactgscttgagttttatagagttttccggagctttaatatactttttttcatctggtcacgttcttctttcctccctttacccttctctgatacttgagcttgttctttgggatcattttatccagtagactttgttcatttaaagagtcaaaatgctcatcaacttgctgtccaggcaggaatttttggcacgtaagaactttccccaaaatccttacaaagtccctttcctgttgaggaaaatcactgggggctcctagtacagccagattctcaggcttcagaggagacattctgaatccgattttctctggaagaggtcagtctttgtatgaccaggtgaatcttatcatcagaaaagccagtgcaactgccaggctttctcctgccacttggctggcgagtggttgcagtgcagggtggggaaagtcagtattagttctctgatggttatgctttgccccttacttggctgaatgcttcatcaaaacattgatgattcaggtggtgacccattaaaggaccagctccatcaaaagcaaaatcacagggccccagaaactcccacttgctaatgtctgaagctaactgaactgggccagatcagagcaactgtagtcacacagggctctgtccccagaggccccggatatggtgagaaatgtcagaaggcattagtgatgtcaaggaaatgaattatgctcggaaatagcaatactcaacttggtcttaatctccccctgcattactcagagctatgaggaaatgtcaccatgcctgctggtaaagatgacagtctatagttccttccaccacactcattggcagaaaaataattcactcaagccccatttttgagcatgtcccaaccagcttcctggtggaagaaagacatggatacaggatgcatgtaagcaccttaagaaaatgcacttaggaatctaggcctaaaataacaaatgagttgactccaaataaatgtgcaacatgtcagaaatcaagtcccctccttctgcttaccctgagtaaaagaaaatataggctaaccttagtaacccgtttttttccagtcagtgggtctttgaaaaccatcactgcactctggcgctacgtttgctacttttatgtaataaaagtaatacaccatttctattattaataaatgagtaatttattattaataaatgaccgctattattactaygtttattacttcctgcataaacatggtggatgattctcagatragccatagctaggtttaccatgyaatttgttgacactggctcttaaaaataaataacaaagtgacccttactaacaaagtgacccttacaaactctacatttcttgtttccaaccatttccatatgctttacatatgttgtattaaacaaaaaacagttactattatataaaattcatgcctgataaacccatgtggaaagaggcaggaggaacaaggtggccctctttcaggatggcatgtggaaaatgatgagaccattaaggcattaagactaagggcctgtgagataggattctctataggcccccatgactgctaccctttgcgtcacctgtgtatgatagcatgaagaataatggaaagataatacttctgaaccctacaaggcaggccaaactcatttaaaatgacagctgtcattaatacagatgtttattgacttgttgggggaggggagtgayactaagtgttgggtggggggcagaatgacctggaatatctaacaatagcaatatgtagaccctgactctactctatgcacaaaaggacagccatgacgtacatcacaatgagagtcacaaacgatcacccaaagaaatccaaagaagaaaagctccaagrtagaaaaaatgagcttggtgttacctgtctagtttatgaccttttcccttttttttttcctttttttttttttttaaactgtccttcaagggggctgaaaaccaattttcatgctatagctctaaatatcagtttatccctctgacagggttctgagcatgcccagtaagaatgatttaacactgtgctgatgacttgcaacagaagagcgtcatgtgaaaaggtagtctgccacagctaatgggctcttgtttcaaagggatgctgtgtgtacattaccagcgtatggagaaggtgcagaaaggcccaggcagccattaggaatggagtgttgttgatgatgaaaaggcactttgccggtgagggaatggtgggagagagaaggcttatctgtctttttgattagaaatgcatgcttcctttcatcatctgagctgaaaaattggcttctgctcttggtttatgaaaacatttttctttttcctttcttcccaggtttgcaaactgcttaataaattagttactgtgagatgctcaggggccacaataaccttagaggcttttcccaaatgcatccttaatattttataagtatttaaatagatttactcaatttgagctgcctgatttattaaagctggcattctggcatgaaaaggaggttctatgcagattaaagctgatcaaaagaaagaagcgtttccaattcatatgaagttttttaggaattagagcaaaacttttgggtaaagctaattgaccaaacagggtaaaaaaaaaaaaatctgatatcatagaagcttgaaatgggagcatcaagtctgtggtcacacagatatctgaaaaactcacttgttcattcattcattcattcagtgagtcaatattatagagactgttgggaattgtgctagctactggtgcctttctgtcattctgttagacccagcctaaaaagataataagaccaaaatttacgtgcctagttagctctcaacccaaggaagacaacaacaaaagtcagataatcttatcaaagttctcattctgaattgcaaataaaagagtaacccccagtctaacaggaaggtgcaagaattttggttctaaaagtttgttcttatctccagggaaagtgactgggtccacaaacagttccaaggaggtgactcctgtgtcagcagttctggagaggctaaccagaccagtcatgcctcggggatccatgagactctatgctgggactacagcttctaaagaccaccctgagctactaaccattcgggcagaacttcaaaaagtcagattccagattccagtggcatcagactctcagaaagaatcccttgccatgtgcccaagcagtccgtgagaagctaaattctattctactggataaaaaaagtgaacttggagatttagatcaggtcatgaaagcgtcagagaaagtacttggaattaaagagaacataaatcacctcctcaaaatatattttttcttatttactggatttctacatgcataatatttgtcaagtattaaatctaaatagtcagacatccaatcctaaagaggatgaaatatgttcgaaagtacacaataatcaatgtcaggcgacataatagataatgccccagtgatactttatagagtatatgaacaattaaggtaattatcaatactaactatttcatagaaatgtgctaccaaaaacaaaattatactagggtctaagtgataagaaagccgcagccataatgggagtctttctaaggccttaccttttcttttcttcactactaactgtttgactaagagagctgaaaattataccatttgtgttagaatcaaatgcaaatggaataattgtcccttttctaatcaaaacacatttgtggattgaaataccacatggggcaattttcagttaatcatggatgttaataaatatgactctaagctcataaacaaacattcctttggctaatataggaaattattgttaagcttgatcagacatgtaacaaaaactgaactttgcagaaagtcagcaaattaaccatctgaaaatagagatgagcatcaacagtaataaaagattagatttagctaaaatgcttagacaaatcaggcattagcattaggaaatatttaaagctagctttgctgaaaatggagaatattaagtattatgagagcattagcttctctaatgagaaaaaactagatgcttggcgattagagattttaaaaactagaaaatcaggtttatcaaaatcaaaattacccagagcctaaattatatcagagcctctaacaatgaatggtgttttcaagtgatayagaaatatttggtactcattctatttccattactgagcttgtaaacaaatttgagattccctcctttagccttgcctaaatataaactatatatttattttggtgacaaaatacctgaatagctataaaagtattacaatcatctacaagaccagggctagatcaggcctgcagaggcgctaagcacagaaacgcttaaggccccacctttccctcctgctgtgcatttaaaataaaaacaccagtcttaaatcacaaaactaatatgtgtgctacaactaaaacatcttctctcagatttactcattttggaattctaatatgtttctcaaaggtgagcgtttctctttcacatgagtgagtgggctcgcttccatgtgctttccgggtaccctaagtgaagtccgctcttcggcgactccgcactttgaaaaaaaaagccttgaaatgaaagcagtataagttaatatcatcatccaggctttaagaagaagaatattttgtcggtttttgttttgtttgattctttgctttgttttttagtctgtaggtcaatccgtaaatatctacatcccaatgcaacctcatgaagtacaagtgtgagatcgtactgtaatttaagcatctaggaaacccaagctttcatctgaaaaattgcaataacaaatgcaaagatccagcacttcctttggattgtttagttaattgtcattcttccccacttctactgaaaatatacacctaagtctagaaaagaagaaattttgagtaacaaggcagtgtgttcagactcagggggccacttttcattacgtacgggacttttttatgatctactttctacttttctaaagctccattcaatcaataaacatggctagtgagagtaataattgtttctatttatgcgacactaagtactcatcagtctcttatttatgttgtcttaacttcttaaactcttccaactattctgtacagtasgtactatttttaatcctcattttctaagtgagaaaactgaagtttagagagcgtaagaaacttatcctggttaatggtatagctgggatttgaacctagaaagacttcagaactgctgacaaggattagcgaaagcaaacgtactttgagtgttctgaattacttactttaaaatattctgtgtaagccaagattgcgaaatgtccctattctagattgtgtaagaaaaaataactactcctattaaagaatagaatttctccttctagctttaagttcatagcttgttgtttcattttctccattatcaaggaaatagagtaaaaaaagtacttattgtgcagcatgcgggtccttgtttgaatctacttgcccttcttccttactgaaaaccagactaaacatttctgaatgtctgcatttaaaaatttccaacagtaatgaatcsactgtacttgggttrctctagccggatcccctcactgttagcrggtctaaccttctactgatataattgcatcaccacactcatggcctttctggtcctttccttggattttccaatataattaaagtccatgtaaagcactggctgttcttaaaattgttgttggaagactggcaagaaggcaacgaactctcaaggcatcatatcttaaaggaacctataaatgaaataggtcaaggatgaggcacgtaagtggctgggaaaaaaaaaaatctccgtttagtttatacaacttcagcttccctgtctgtccagattccatataaggaatagcaactttttgagccagcaggcctggacatatttcttggccttataactcacagttctagacattccaaggtagagggtcattcaaactgagttgtaatttcttgtgtatatttatttccaaagtatctaatgcatagtttcccagtgaaatcatagatgaaggctaggggaatgctaactgggttgtttttcaagcgtgcctacaagaggcagtctaaaagaactgctctgagcttatcaagcagaagtgccagatgagagctggaccaccatagcaggagctctcacaccactttgcagttcacctgaactccagctttgtctgggagatgatataagaagagaagaaggagaaaagacattcatgagatttaaggaataaattcccctattgtcactagtagagtgacatgcataacacactaaccaggttgatagggtagtgtgatagagtccaacaagaatgtgctgggaggtcaaccatcggtatttaggtgtctcttccaaatcccaaccacttatcagcagagcagtcctgagcacacaaatggcamcttagtgcttggattgccttgtgtgtgaaaacaagtgggacagaggaagatggcagcacattctctttgcatctgacagtcaccaaaaattagaagtcaaatttttcatatttgagtttttttttgtacttgcaaagtgaacaaatagtatatttagttttacatctttaggtgaaaattaggaaggcaggacagataataaaatgagcacagtttttaaaaagatctagagttgatcgttattaactttaagataatgagaatagtttaatcaaaagcatttcttaaactttcttataaatactgaattatctgagaaaaagttaagttaccctctagtcattcaacaaatattttttgttgtctgttagttcattcattcaggctttactgaacagatgcacttcttggtacttgcaatatatccatgaataaaagagatggatccaggccctcctggattacattctcctggggctggggggaggctcaataaacaataaagataataaatgagaaagttcttctacaagctaaaacatgttatgtgctagggaagaaagagaaaatttagtaggctaagggagtcaagagttaggaagctggagttggggactaaggtagcttgtcttcttaaataaagcgatgaggggccaggcaggatggctcatgcctataatctcatcattttgggaggctgaagctggcagcttcctcgagctcaggagttcaataccagcctgggcaacatagtgaaaccccttctctacaaaaaatacaaaaattagtcaggcgtggtaatgtgctcctgtggtcccggttactcaggaggctgaggtgggaggatcacttgaacccaagaggttgaggttgtagtgagttgagatcataccactgcactccagcctgagcaacagagaaagaccctatatcaaaaaataaaataaaaagtggtgacagtagacctcattgagaagatgactgacatttcagctaagatttctaggagtgaagatgtgagctatgcagatatctggagaggagcagtatgtgttcaaagaaaggcagatacctctaagaactgaggctcattgccccaaggaacatgagaggtcatcataggaattttcccagaggagagtcacaacctgtttctaaattcacaagttgtactaaaatccataaagattttctttatgtttattaatgtatttattgtactgcttagtgaactcccagataattgggagtacatatatgtactcaatattatagctatgtacacatatgtacccaatattatagctacaatatattcatattatagctgtgcattaaatatatcaatttaactttacagttaaaataagtatgtatgtaagtacagtctcctattctaactaatgctcccaaaccaccatcaggcactgagtgttggtgttctagttgggagaatggaaaagtgttattctatataaatgtattcacccattaaccatgaagcgtaactcaagcatttgtagaatttaattctactggcatttattcagtgctcacttctgtgccagaatatatgttaggcaaaattgggaatgaggaggccccagtggggaggagtacaaagcacagagtttggtcacttaatcttgaccaaattcaccttctcattttcaaaataaaaagagaatatcttctattgctcaaagttttggtggggattaaatcaggaaaggcatcatctacctacaatagtgttggtcacatattttgtattcacataacaaatactgcttatctctcccctgaattaaataaagatgttattatttttaaattaactaagatgaagccaagggggaatatcaagtttgctcctggagaagtttcccatcagtgtacaatcagcagaagataatttttttaaaataggattttaaaatcccattttgcggatataaagagtacgtatacataatggagtactattcagtcattaaaaaaaactgagattctgtcattcgcaacaacatggatggaaatggaggtcattatgataagtgaaataagccaggtatggagagacaaacttacatgttctcacttatttgtgggaactaaaatttaaaacaattgaactcatgaagacagagtagaatgatggttaccagagacacggaaggttagttgggggtcagggaatgcagggaagtggggatggttaatgggtacaaaaatatagttagaaagagtgaataagacctagtgttcagtagcacaataaggcaactgtagttaacaataatttgttgtgaatttcaaaataaaagaatgaaactggaacattcatagcacaaagaaagaataaatgcttgaggtgatggatacctcatttaccctgatgtgaytattactcattgtgaacatctcatttacctcataaatatatacatctactatgtacccccaaattaaaaatttaaaaaacacaacaacaacaacaaaataacctggcatttgaaagcttggtttcagccacttcatttttgctgttacattgataaaattacgtaacccactgaaggttagataccagtgcctggcatgtatgaaaaaatgcttagaaatgacaattgctattgctcattgactgctttgtgccaggaactgctctaagaactttatattgtatgaactcatttaataaccaaagtcactacaagggaggacctactatcaccccattttacagataaaatactgagacacaaaacagttaagtgatttgcccacaatcacaatgcagtagttctagaacctatactcttaattatttagttaataaattacttaattacttctttaccttctctcattcctctcctttttctctttcttctccttcccttcctgtccctcttcttcccccatttctccatcttttccctcttatttccttccctcttctcttcttttttcttttggtgaaagttgaaataggggctggggtatggtaagtctgggactgggacgtatggtctgagacgaccacttgcaaagtcatgaattaagaaaattttccctttgactatctcactctcttcctcagtttccgatgctctcatgcgtcccctcccagcatctcctacatttcctattggcagggacttgctttcatctctgcaaactgttaattatatccatctgagatactctcaaaagccaaggcattaaacatctgggatttgagatggagaacaatctagcacaaactgaggtagagatatatttaggtgcagaggattctcaaagttctatcacagaaagcagctactgccaccttctagtaaggtcaacccagaacaggaggagcgataaaagggacagcacaacagttgctctggacccctgaacactgggcccctggccactcagagacctagccttgaaatttagggttgggtgccatattatcagctcagccacaatgcaatccactttctacatgtgtctggctgctccacccaccacttccaccctccaacctcaccctcacgttgcaaggcctgcaggatccaagctaagaattctagcttagacagatctataagagggctgctttgcctgaaagcaaggatccactggagtctggagtacaatagctataatacccaattagctgggagttcatttagcaaacacagttccctttatttgatgtactttcagtgttgcttatgagctatattctacttaagagtatgaactcaccaattatttgcctagcattatgaatcatttatctagtcaatctaatattcttcccttatgcatcttaatacctcaattaactattatgagtcatttgttatttgtataccagaaaactgctttccaagcgattacttattggtcataatcaattagggaagtttttagactatggctgttttatataaatacactggtaaagttcagctcctatgatttctgacaattaaattgttctgtcacttggggactctcattaatctcaacttgtcatccttgtttatgcaggttataatgggctatrtgtataagtgaaatgagatgctaaaaggctttggctttttacctctttgatgaaagtaaaattgaaataatttattaaagtggtgactttgaattgcacagtttgaaggaactgtattctggacagtggcctatgaacttcaccataacccacagcaatctttgtctttattcgcaattaagaaattagaaatatgtgaactagctcctgacacccccactagattcttagyatttgtatgtctggagaagaaaacctcagagaagaaatcaaattgtgttgctttccgtgctctccatctttaccaatcaacttttaaaagttctggatataactattatataattaagtaaaagaaaagagacatcctagtggtcaaaaaggtcctgggaaaaatttagatgttaagtgccatcgacaaggatttgatcaatggcagggctttaaatacggggagattttataaagagtacttcgggattagtattaagatgtaatttactgagcatcattatttatgatgtgaaatatgcaaacagtgcattaattaaattcaggtgtctctacctttagcaaaacctctgacgataattaaatcatacaaaataacccaagtcaacagattagaaatctgaacagaaatctaggagccttaataaagtcataaatcactgtaaaaggaaatggtgggtattcttattacattgagagaaagtctgaaaagactgtgcaataatagggctgattaaaaaatgtatctgaaatacgtctggaaggaacaaggggagctaaggtacccagatgaagctgctgaacagaaactgatttaagaaaagatcatgggacaaaaatatattttttaaggagtccagatcaacttgacttgccaagaarattcaggtggtcccatattgttgagctacatctgcctgtggggtgccaagttgagagggtgaacaagttcattctttagaaaaaggctttagtaactttgagtcttctgagtggtgcaatatcttggggccactctccaaaagcaaagaaatcactgttgacaaggactttcctccaagggttgaaatagggttactacttggcattagacatcccttctcatgattccatgattctgtttttagtattctgctgtctcctacacaatgccactggtgccttttctgtgtaaatgcagctaacattgacagaatgcttgttacatgccaagcattgtagtacatcctcatttatctgcacaacactagaaagtagatattattatcaaccctgttttatgcataaatagcggttcagtaatgtgctcaaggttaagggaaggatgtgagctcaatcttcctccccttagaccccaacttgaacaactccactggtttgtctctccctttgagcttcaatgtccatgtcagaccgtctcctcattcacccccttccccaagtgaatctgagaactgtaagagcagctagattgtctgtggtatcaattccttgacagcaagaactgcatcttgtttacttttcaatctcacacagagtaggtattgatggtactggaygaagacagtgaaagaaagaggcagaaggaaggaaaagagttgctggactcagtgacttgtcatacccatccagtgtaggcagtcatgtgatagagaaatatatggaatgccagttaagagacatggttgtttgtccagctgtattgctggttggctctgaaatattgagcaaataatttagtttatcttagcctttgtttcctcagctatgaaatgaagatttggcccaagtgaccactatgataccttgctgattccacattctctgattttatattcacgtcaaaggtgtttctttccagtccactagtgaccatgataaacctgtcttgccccaaaaccccttccatgtgccaagcactttgtatgcattatcttcctatgagcctcataacaaccctgtgaggatggtactgtcacccccatccagcagagtaaggaaaacttaaaaggtttacaagcttgaggtcatgtggttagtaactggcagtaaggcagattctggtctcatgcatttagaaatttagatgtctactagagcttgagaactgttgaaattatcagctaaatagcttcttagaaagcacaaaatactgtcctgtgaccttgaaatgtttccaaagtgatttcctcaatcaacagggacttgggacttgagaaaaatgaaatcgtcactgaaatgtgatttttggaatctgccatgttcgcagtcacaactgcatctgtaaccctgggcaagcatctcacaaacgcatcagatcactgcaaacctgtcaacacttggctgtctctgccatctctccaaaggccggcccctggagcactttctgtctgtaccatttggttgtcacttaatcaaacactccctcwtctagcctgttgcttcatgtgccttagccttcccttgccaacacaaacataagttccttaagtaaaaaactgagctttgtgtttctttccagacttagaattatctataacacagttggacccattaggtaactctccctttcattcaacctatgcakcccattttcagcagaggatcaatcaatgtgctctttctctgcttcaattctactatcctaaaagtattagccatcccacagttctactgtattcaactgaaaaccacagaagggtcttcagtaccagaacatgctagtaagcctggtatttgactgccaaagacaacataattccaaggtaaagaatgtgagcagagatgctgcctgccttctggaaagagrytttattttaacagagctcttcagatgatagttccatgtcaacccaaagcaagtttaaaatcaaacctaagagagatataggatgatagaatctccaagatcttgaggaatcttgccaacttcttcccttccagatatgcttatacctgccccactcctatcaaagaaagctgtgagcatagaattaagattccttcttactcagcaatatggatgacatgactttcttacttctgatttaagaaatcctgcacagcagaaaatctttcagaaaactcaagactataggacccaatttaaaaacaaaaacaaaaacaaaacgttattctaaaagtaattatctgcctgtagagcaaatggggcttgggtaaaaggtcttgacatccctttgaggacccgtggactttgcaaagcagagcaaaaagcattaatcactggccctgaaactcatccatctttgcaagtcctaccttccagagtgtgagctccaaccctcccagagtaagttgcactataacagtagatagttgagtcacttgaggcgaagttgtttggtttcaacaactaaatacagggatatcttcaggatacatcctagagtattagagattcttttccccccacatctggaaagttgaggtgcaaaatactaaaattcatcatagtcataagatcctttgtatttttattatctaaagaaataggttccaagtgaagatgaagagataatagtagaaccaagaatatccggcagtaatagttactatgttccaagtacatactgtgtattaatactaagcacctttactttttttatttaatattcacaaaaaccccatgaaatagatgtattagtctkttctcacactgctataaagatactacccaagactgggcaatttataaacaaagaagctgtaactgactcacaggtccacatggctggagaggactccagaaacttacaatcatggcagaagggaaagcaggcaccttcttcacaaggtggcaggagagagagtgagcaagagagagaagcgaggaagagccccttataaaaccatcagatctcatgacaactcagtcactatcatgagaacagcatgggggaaaccccccctcatgatccaatcacctcccaccaagtctctccctcaacacctggggataacaattcaagaggagatttggtgaggacacaaagcctaaccatatgagtgagacttattcccattttgtgcatgagagtaataatctccagagaagtctagtaataacacggttattaggtggcagaacttggattcaaatccagagccctcctattccaagtctaggaaattagccactgaactttagtttatttgtctatccttgcaaatggctggactttcaggactgatcttggagtttggtctgtgtgattaatgaagttggaggaattagagacaattgctgacttgcgtggatacctacacttgggctctgctgagtgggtgcactgggtccttcaggtttgctagttaagggacagtgtctcaatataaggctggtgtcaacggggagagtaaaagtgctgactttgaacatagtctttggaagtagtgttatttgaaaaagctgtgcagcgtcagagctgaccaagaatccagctgtgaacagcactctaaagagtgttgatagaatctgggctgtccagctgtgaggggcccggaagtgcctgaagaggtgacaagtgctggagacctcctttacccctccccagcagctgctgctgctaatagcagaagctgcagagactcacagcagccaaaagtcacaaccactacactacactctcagtcttaaggcatcaccaccaatcatgagggatgtaaatcaactgcccccaaagacaatgatgcccctggaagctgcagaaaagagcttggacactgggccacagtaatgacctagccccactaagggcaacagaggagccaaaccagagaaattcttccttgatctttccccacctcctctaccataggcaatgggtagaagttgaagctagagtatggcttattagccagggataatgtagaaaatgctatcagcatgatgtaaagcaatcagtaagggctttggagtcaacagtacctagattcaaatcctgatctttcagtggacttgctatgcaatcttgctaagttaaataagcccttcaagtctttcttcatcattaaagagaataatagtaatttctgtttagagttatggcaaacattaaatgagatactttataacttgagatacatagtggattttcaaaaatgttaattttcttctctcctctcatacatccacagagggataaaaatagcaattttctgctaagaaaccccatgaggttggacgcccagaaatgccaggtgaaaaagtaagccaactatagagactttgaagtgcaatgtatattgccagtggagatgccaccagggaatgtgagtgggttccagcaggaaatatgttaaaatgctcagacatgccctttccagttttgattattttttattcctacaatgatgtaagtgtctgcgggcaatgtgacgaacacagagagtgcttccaactccagcatcttttgaatcagtattttaacccaacttgaaaactgtattcaacactgtaagatacagaagtttgtaggtaaataaaaatgtttggaagccatgatcccatccttacctgtgaagatactctcctcattcaagtccaagtcccactgccatatgctttatcaacatttctgttgcaagtagcagaaacctcaacttaaactggcttaagctaaaagatatatggctcaggaagatgaagagtctggtttagcttcagttccagactaatgtagacctgaaattatgtcagcaggactcaggtcctcaccggtctgctttgtgttggctatatttgaggatctgcatggtggcccacaatagcttcaagactcctttgtcacaaaaacccagtataacagaagagggaaactgcctcttgggtggcacaaagaaaaaatttgagatccaggttagggttttatgattattagtaaacccaacttggtcaggtgggtggactgggagcattatcttggcttggaacatgagatacccctgggaataaagtcagtgccatcgtgagtaaatgggctaagagtaaagaggtatggtaaccccaaagcaagttgggtactctcgacatgtaagcagcacggatactacrgagcaaaatttcctctagtacactctagcccctagaacaacaacctttacgtcccttaaactttaccaacttcctttatgccactcatttagggcttaccgcaggcaactttatatttcaggttaatgattagtgcctcaagggcagaaggtatcttaaatctttgtctccatcaacattgtctttcatagtgctttgcccatagtgagtaaattaagggaatttaatagaaattaatgaatttaacacatgcaagcattgaaaatgagtaattgaagtcaaaagttgaaatagttgatctggggaagagattaagagaaaactatgttaaaattatacagtttccagttgagtggaagaaaaggaaatcaggggccctttacgcaaaagtcgctgtcagagactttgaagtgtaatgtagattgctgtcagaaatccctaactgccttaatgtgtctgctcagtcgtcaagagattgagaggacacattgctcatgtgcaccgaaacccccatggaaaacaagcctgaacttttccagtcaaaccagcaagaaacatttcctaaaagatgaaggaggcaggagaattaattggagtgtagaggatagggaggaggcaaggtctccacaaagagaaaaatggttttccggtaattctatcaagaatttaggagaaaaaggcaaaagtccagataggaaaattcactatcaaaattacccaaaaagtctgtcttcaggattaggcctgttcaccatcaaatctggagaaagtcttcattgctacataagacagaaaagttgatttagtcttttaaatacaatctttctcttttaaaattaacctccaggcttatcagggcatggagtgtagattgcttctattttattaagaattgcccatttcaccttgtcaggaatgcacagcacacacacaagtataagaaatttattataaccccattgttgagaatgacatttcaacagagaatttccccttaagagaaaaagctaaatgtgtctttgggtcaacaggacattagacaacttagaacaggaggtggcaaactatggcaagtaggccaaattcagcttgatgtctgctcttgtaaagttttattgtcacacagccatacccatttccatactgttgtctagtggctgctttctaaacccataagagtasagttgaaccgttccaatgagaattgtattagccataaagcttaaaatattttagcatcaacgagagcccctgacaggaaagatgtgccaaccctgacctagaagaaagaggattctagcccacgagaaacaagggtgctttttctaccagttctcaaagaatcagacatgttaatggtaagatgatagcatggtgtttgtcatcatcagtgaggacttacagactgtgagtaaagaagccaggaacagagaaagacagaagtggagtagcaggccactcaggaatccagaggggcgagataaaggagggcagaggtgtacgtcaggcctccatggagcaagagagaaagacaggagcaattagcagaaaagcatgccgtggctttgtctgcctcaaaatgtttctttcccctgctactgctgcacatttcaatgttttatttctccaaccctctgagcattaccaaacagttatctgagcttctaacaaacaattattccagctcctaatttatatttcaatcattttaactactgatcttatgatcacatccaggctctgatcacattagtgtctattaactatgcagcaaccaataaaatctgcatgggagacttattccatatatactcccttagtacaatttattaaaataatgtagactattaacgtttaaastaaatgtaatatatatatttaatataaaaattctcattactgtgattaataaaatttttggtgtaagctgatatttagttagagaaaatgaacaagataagccaactgaactatttcacttacattaatttaattaaatatgacttttacattatgtaggatcacatacataccactgataattctaacatatttaaggaatcaaaaagtagacccactatcaaaattacaattaaatcactaatggtctttcttttttttttttttttttttgagatggagtctcgctctgttgcccagactggagtgcaagtggtgtgatcttggttcatcgcaacctctgcctcctaggttcaagcaattctctgcctcagtcttctgagtagctgggattacaggtgcccgctgccacgcctggctaatttttgtatttttagtagagacagggtttcaccatgttgggcaggatggtcttgaacttctgacctcccgcctcggcctcccaaaatgctgggatttcaggcgtgagccaccgcacccagccactaatggtctttctagataaagcatactaacctctctcactttactagataggatctcaagaattaaacaagttgaaaagtaatacagtaatactgcttggttttcctccttaaaaatctcattgtttcagtttttttgtttgtttgtttttccttttcawctgcactagggctgtgtgtgtgtgtagggaagagacaggggcaggagrtcagaggcagagaggaagagaaagagagaaagtaacagacacagagaaagggagaggcagattccatgctgtttctgtgcattatctctctttatatagaaatctttccccaaatgatttcaggatgaatatgctggtcacattccactttcttccttctgaccttgtgtctccagctgagctgacatacctgccctgacaatttctaactttgtgacctctggtagataagataactacttcagcctggtttctccattagtaaaatggcaatggtgttggaggtggctttgtaagggttaagtgagatgggtagaaacagtccagccttcagttgctacctctcagagctggatgcctctgcagctgcctctgaaaatgttgattgactagttgycttcaagcattagcacacagccagtgtggccaaattatcttctacacttcaaaagtcttcccaagaccatggccttgaatccaccctattgctcttttccgctctccttgtcttctgtgctgatggcattctgctgacccctacrttgtgccgtgatggttaaggactaaaaggtggaagaggagagtgaattgagcaccagtactggggtctgatggatctgtgcttgagtctcagcttactgactgcatggcactgggtaagtatttagtctctttaagtcytagctttcatctctactaagtgggatgaccaataattgtacttactaaaagggtttttgtgaatactaaatggttactgcagataaagtgcttacaagtgtctggcccatattaagagcttaatagcaataccatcaacaacaaatgagacagtgactcctagaacaaaagcactgctctttggtggctggattatgcacttgtggtgagtttaggacttggggagwcccagaaacatgtctgcaactagcagagtagctggcagtgtgaagattccatttctgagaagaacagagaactttttctatattatcctgcttcccacagtgaggtagaaaatgggacatgggaagactccaactccatgttcattttttgacattaactcattaaaagagaaaaaatctcctaaaccaacaagtagtgccaargaaagtcactgatgctccctccttaggctctatcgggttatttttaaagggtctgcttgagaatgactgaagctacaagtatagccagaaacacagctactttcagagggcaagatcraagtgaaaagatgaaaatttgccccctaaaagtagtcactctctgaaatgcaccaagagccctgatgtttgataatctggtttcataccccaaagcaaggtacttctgcctccattgctaagaagggacaagaatgaactgaaaacaaaatgatgacttttgggcctacgatcaacactaatttttgtaattcttaaaccaggaggagaacctgaacccagcctgaattatcgcccaatctccttaataaatgtggacagggaaatctcagtaaaggtgctgrctaataggctggaacagatattcccacaccaaatccatcccaatcaggtagatytatttggaacagacagtgaggcaataatgggaagcaattattaaatgcagtacagtgaactcctggagacagagaagggcccgtggctgccattccacctccttctctgaagggcctttgatcacctagccactctgcccctccccttcattcagcaataatttggacygaaggcagcattgttcagggggagctctcaggactcacaagtcctccccgcccctctcagtaacaaactagttaataggacttgcgtcatcacctttgtcaatttcccttgccccatgacccttatttcatttcaaagttatgttagaaacctgtagaagaggcttacttcctctgtcaataaacccactacttctaagaatctgtcctttctttgcattgtgaggtgctatttcggggtcaatagcatgggctctggagccagactctccctgatttgaattctggacccagtaagtatcagctgggcatatgacttagacttcctgtttcaggattttttcctgtgaaatggggatcatgtagaatgagcttcactgaggtgtacaaatcaaacaagctcacgcaagtcaagagcaagttagttaagttagtgcctgacacacagtaagtgcccaataaattttagcaagcattatcatcaccatcctcatcatttttgcaggagttatccattgcatctgagactccctagttccaacttcacaagaaattgatttcattttaataaatcatttaattttaagaaatctctcttctctactttattttctgaattccacattcctgagtaaatcttaggtaaaactcagctatctgtgattttttaagttattttcacttgttcaatattgcctctaaaatttgttcaatgtctctttccccctcttctggagtattcttgggttatcccctaacaaagctttattgaaaagccttaagttgcatctatttcatgcccaatgattatattatctttttcgcactttccattagctgatatatatatatatatataatcatgcccgtgtctctatcatttaacttctggttaatgtgtcagttcctctgcatttgctcttcctcctgtcaatatttcctttaagtacattctcagtttcaggtatggaatctgtgcctcagatttctgtaaattgcccctacttctaagtaaagagtcttctttgggtttaagaatatagatagatggatvatvgatvgatagatagatagatagatagatagataghtaghtagatacatagatacatagatacaywgatacatagatagttttcactgatttcctgacaggaaagaattgaattattgatggcccttttagtatatgtttaatatacttccacttttatatttaagaagaagaaaagataaatttggaaatatatatgcaatttcattataaggtgctatttaagggtcaatggcatgggctctgaagacagactccctgatttaaattctggacccaacatgtatcagckgggcatatgatttaggcttcctgtcttcaagatccttagctgtggaatgggaatcatgtagtatgaacttcactgggggggttgtacgaatcaaacaagctcacacaagttaagggcaagttaactaagttagtgcttaccatatagtaagtgctcaataaatttgagcaatcgtcgtcatcaccatcctcatcatttctgcaggagctattctttatatactttgtatacatatatagtatgttttatatacttccactgatatctttaagaaaragaaaagataaaggtggaagtatataaagcatatactaaaaggaaaagaaaatcacaaattcttttaccttccaaaaattcattgacttctaaaaacttactgcattttaaaataatgtatctgttgaaaatgataactttaatagggccttgcagattaactaagtgcttagtaagttttctaaagctttacaatgaactgtactgagtctatgataagttccaagactttcttcgtggaagtaaataacattcaagtaaggtcttgaagcatcaagtgtaggtgagaaatgcattcagggcagaagctaaatgaccatgggcccagaggaaagaataatttagaggcctttggcaagtcagaagtcctgagtagagctaggtatgtagaggttataggatgaagattctttaaggtaagcctgttttgctttgttttattgtatatatatttaagctgtacaaatgatgtttggaaacctacacatagtggttgtatacacttatatatagtggttaaccacatccaagcaaatttacatatccataatctcatatcttttagccatgtctgaaaagttggatgatgaggttgtgaaaagccttgagagctatgccaaggaattttgacttcatcccagtatctgggtcaggagagagtcataatcagagcaatcatctgagaggattcatctggattaataagggaaaaggtaggagcaagagaggagacccattaggaggcttctgaaatgagttagacaagaagtaataaaggtttaaatgagagtagtatcagctagaaagaaaaaaaaaaaggcatcgcatctcataggggtgaaattgaaaggacttggcaactaattggatgtggaattccaagtaaaaaatgctgaagatgctgagctggacctcagagggctacacctggcctcatgggctgagaagaaaggccgaggtcactgcagtaatgaatgctatggaagaaaactagggctcagaggagtctgcaaaggtggaggaggccagccctgctgctgtgcggcagcccagcaaccccacatcccccactgtcgttaccacacctgagcctgtggggactgaggctgggaacaagtacatcaaagcaggtgacgatgaaccagagtacaaggacagctggggctttggcaatggggagctggtgtgaggaaaactgcagggcttctcctggtggccrcattgtgtcttggtggatgacaggccaaagccgagcagctgaaggcacccrctgtgtcatgtggcttggagaggtgagttctcagtgctgtgtgtagagaagctgataccactgagctccttttgcagtgtgttccaccagaccacctataatacaacaagcagcccatgtaccacaaagccatctacgaagtcctgccrgtggccagcagtgtacaggggagcwgttctcagggagccatgacagtgatgagagtgacactgccaaggatacagaggtgcagagcaagcagatattcagatggacctttggggggttccagccttctgcccccaagagactggagccacaagaagaggagaagaatcccagcaaagaagtttatgcacacgtgaggggtgaccctgaggcaactgcttaggcaccacccccaccagccaaagagccccgaaagagcacagctaagaagctcaacatgggaccaggcacagtagctcacacctgtaatcccagcaccttgggaggctgaggcgggcggatcacgacgtcaggagatagagacctgacatggtcaggccaacatggtgaaaccccgtctctactaaaaagtaccaaaatagctggacatggtggcatgtgcctgtaatcccagctactggggaggctgaggcaggagaatcacttgaaccagggagtcggaggttacagtgagccgagatagcaccattgcactccagcctggtgacagagcaagactctgtttcaaaaaaaaataaaaaaaaaagctcgacatcaaggagattgttgatgaacacagaagagtagttagtgtacaangtgaggaagaagtgccagaacatcaaggacctttgtgtctcttgtgagagcctcaatgtcactctggaacagcycctcttcatgctaggaatatgacgacattgcaagaactgcttcctggaatatgcataccagtatgatgaagaaggctatcagttctgctgcaccatctgctgctgtgggcacgaggtgctcatgtgctggaacaactgctgcaggtgcttttgcgtggagtgtatagacctcttggttgggccagaggttgttgcccaggtgaccattaaggaagatccctggaactgctacatgtgtgaacacaagggcatctgtgagctgctgcagtggcgggatgactggccctctcagctccagatgttcttccccaataaccctaaccaggaatttgaccctctggaagtctactcgcctgtcccagytgagaaaaggaagccgcccatccaggtgctgtctctttttgacgggattgatatgaggctcctggtgctgaatggcttgggcatttaggtagatcactacatgtctcagaggtgtgtgaggacgccatcattgtgggcatgctgtggcaccaggggaggatcatgcacatcagggatacccgaaccatcatacagaagcacaaccaggagtggggcccattctctgcaatgacctctccattgtcaaccctgcccacgaaggaccctacaagggcactggccagcaattctttgagttttctcacctgtgcatcatgcacagcccaaggagggagatgatcacccttcytgtggctccttgagagtgtggtggccatgggcactagtcaaaagagagacatctcacaatttttttattcgaattccatgatgattaatgccaaggaagtgtcagctgcacaccagaactactacatctgtggtaaccttcccagtaagagcaggccattggcattcactaygaatgtaagctggagctgcaggagtgtgtggagcatggcagaaaagccaaggtcagcaaagcgaggaccattactaccaggtcaaactccataatgcagggcaaagaccagcgtctccctgtcttcatgaatgagaaggacaccttaggtgcattgaaattgaaagggtatttggactccctgtccattatactgacatctccaacataagccattgggcaaggcagagactgttgcgtgagtcatggagcatagcagtcacttgccaattcttccctccactgaaggggtattttgcttgtgtgtaagggacatgggggcaaactgaggtagtgacacaagtttaaacaaactaaaaaaaaaaaaaacaaaacaaaacataataaaacactaacaatgtaaggaaagagagaagtatcagcacccagaagagaaaaaaagaattcaaaacaaaaactacagaggcagaaataacggagggcttcgccttgcaaaaagggttggacatcttctgatttttcaatgtttttcttcagttctatttaaaaacaaaacaagctccctcctcttcctcctcctccgccctctgcctttttttctttttcttttttttttttttttttttggtaagaacttttgttttctactattttccatctatgttgctgcaaaggacattgatgcagttggaggccattatcttaagcaaattaatgcagaaacagaaaatcaaataccacatgttctcacttataagtggaagctaagcattgcgtatatatggacaaaaagaggggaaccacagacacagggcctacttcagggtggagagagggaggaagttgaggattgaaaaacaacctaatcaggtactatgcttattacctggtaaaataatctgcacaccaaacccctgtgacacacaatttacttatataacaaacctgcatatgtacccctgaacctaaaacaaaagttaaaaaaaggatggtgggatgtactatgtcttttggctccgaacccacctttctatgttaagctttgggatgctgggcatgggactctacaaacatcatttctccttggctagctggcttcctactgtgttctactaatgggagtgacagaaaacatcaagaggcagaaggggcatgcttcttcctgtttgctcactgttctagtcggcatcaccccagctacagcccttcgctttggaaatggcagttatttccaatttccagttattttccactcctaaaatcagtctcatgttgcaccccttcaaggtactagacggggctcttcccagaggcccaagacccagctttgtaaagacttttctcctagtctgtagcttctaataataacaaccttcctcttgagcctcagattgtttttaagatacctgactttgtaaactgtacacaaagttagtacacagtagttattaaaaggagaacaaagactattttttttctagttgagaatcaggacaagaaattaggtgggttggatcatattccaaggtctgtactttcttcccatcttctctgtgctcaaagcactcatttgctacctaggctcgagaatgtcacctgtacacatgatttggggtcaacatggtccacattgtcctcattttgtctatgccttaactattggaacagttaagaggtaaacccaccaagctaagtagacccttccaccagcacatccaagagcaagcatcttggtggcactctcttacttagactttcctcttccagtccttaatggtgtcaggcttccacaagacactgcattcaacatttgagttattttgcaagagaaagtttaaatcaattgaaaaaagcagaatcaacttcaacaagaaatacaacaggaaagaggaaaaaggactctgtctcagtaataattaggctcgtcttaaaataaaatctattttctgaatgtaccataatttctgaggttggcagaccttgttgcctgtgcctcattgttctatctgtcaaactaaaggccatgaaaagctctgaaccacaatggaaaaaacacttcaagatctaaaaattgctaccaaagacctctctgggggacaccatcttcatggaatctccagaaagaagccagtctgagtctttaagaaacttaagaaaaattatgcaaataactcaacctcagctccagggacttcctcttactaaaatcgatgctgactcaaacacataaaatgattaggaccaccttttcagtatataatacatggttttgtttcattaactaaagagccctgtgttgtctgaaacaacagagaaattaaattgatgtgagttgctgtttgggcctgaattttgaaaagctgtgcctcttaattctaccctgagtttaaaatatggcacacctggacaatctggttttctccagggaatgtactaactctggatttttttatccatctgaagtccaccatatggaacaactgtgtcattaaaatgggygttaaaaagatttgttcactcagctacatttagacagataataatatttggcaattttatatagtgcctttcacctgtccatctcaaagtaagcaatttataaacacatattgttataaactttttataagccagaggtatgtcagcttttccctctgcagaaaacagctcctgcatgccatacactaagtccataccaagtaagagatggcgcaaaatcaaaaaacaaaatatatacacctaatctgtactcataaaaattaaaaataaaattaaaaaacagtccaagaatgttaagtacataatagctaaaatagtaactacaatttgtccaccctgagcagggaaaaacagaaacactgcatgtatggaaaatatttgttttctttttcctagccttggatccacaaaaacagaatttttcataatagttataacactgttacttaaataactgtgaatgaaattggttaaaacctcataaccacttcactttagcaatttggtgtctggcaataagaattaatagtctccctatgcaatttcaattaggttttccataattgccatccattttcatatctagctctttaggtctatttctcagtagttcagaactcagagatgtagaaacatagttcattgttctttacagaccactaacattccttggcacataatatatgcatataacttatttatatttctcttttcttccaacctcagtctgtctattaaacaatgcgtaccttcctttccataccacctttactctgtgacttcttcacttgtgtagcacaaaagatttctaggggataaatgtcacatactcaagaaaagaattgagcttcagactgttttcatttatcaaacatgttgatacagattacaaaacataaatatggattaaaaatatatcttacatatacatacataacttcacaaaagtttgtcagatagggtaggacaaagctcatagtgtcaaattctgctcctgggaggtgcaaaagggccaatactgtgaatagaacatccaggcaaacattccacaagatatgaatgcattgtttgcaactcaatggataaatgcttgaggggatggattccccattcttcatgatgtgcttattttacattccatgcctatatcaaaacatcttatgtaccccataaatatatatacctactatatatgcacaaaaaataaataaatacttttttaatgatatgaatggatgaaataaggcagccagttacagactgtctcaagtgatcaaaaagattcctgtcaacatagtccggataatatatgcttaatataagaatatcttgtactaacgattcccagatgataacattttaaagtatcaatttttaaagagtttacttattatgagcatgttttccataatgtttaggaaagattggaaactcaaacagttacaggaactagacaggtaacattaatgagtgaaatatgcaggtgtataataacagggaggagtatataataacaatagtttgttgtgatttatatcctaatggaaattcttttataagcacatagcatatatgcttacatatttattgataggtgtatatgtaaacatgtggaaaataagtgcatacacacacatgcacatacatatatgttccataatttttaaataaatctgatacaaccctattaaactggacacacatgcaccctttgaaatgggtagctgcctctcagctcaaggcaatcgctttcatgcaagaatgtagaccctataaggacagatattctgacttctcaacaagaactgcaagttttcactttttcgaaagtgaaatattttaatttttaaatgttggctccaattttctttaaaccctcacctgtcaagtaacagcatgtcaattagtcaaatcttgttccttagcaacaagcttgcaatcattagcgcccagtaaagctcgtatttcatgtctgggaagaaaactaggggaaaccatacattgtttaaagtttagtttttggcatccacagaaataaagatttatagtataaattaagttcactatttgaatatagttatatttcttgaaaaattgtgtttgtgaatgagatttctcctcaacacacaaaaagcttttttaaatcagtaagaaaaatgggcacaaaaagttatgtataaaaaaagtgtaaattatatgaacatgcaaatgttagaaagaaaaagcacatgactattaaacatagaaaaggatggttaaccccagtgttatgcaactcactaaaaattttttaaggattataaatataattaaaatatcaaaaaacatgaattatgtaatataaataaataaatttatattagatataattatataataattatatatgtatataaagtaataatttttataatgcttatatataattatatattatatatgctaaagcatagcaagagtgacttttactccagttcccaataagttcctcatctgcttccgaaaccacctcagtctggacttcactgtccatatgactatcagcgttttggtcacaaccattcaacaagtctctaggaagttccaaacattccctcatcttcctgtcttcttctgagccctccaaactgttccaaactctgcctgttacccagttccatagctgcttctacattttcaggtatctttataacaataccccactcctggtgacaattttctgtattagttcattttcacactgctataaagaactacctgagacggggtaatttatttaaaaaaaaaaaggtttagttgactcacagttccacaggctgtacaggaaacatggttgggaggcctcaggaaacttacaatcacaggaggaggcaaaggggaagtgagcacatattcatgtgttagagcaggagaaagagagagagaagggggaagtgccacacacttttttatcatcagatctcttgagaactcacttactatcatgagaacagcaaggaggaaatttgcccccatgatctaattacctcccaccaggttcctcccttaacactgggaattacaaatcaacatgagatttgggtggggacacagagccaaaccgtatcacaatctgtgagtaaataaatgggaagtaactgaaaacaaggaaaagaaggtatttttctataccaataataatgtttttttctgcattgtgattactaaaagctttaactctactatttgtctttattttcaattggttcccatcttactgttctctcttacaaagaaaaaaaatcaccttctctggtgcccccttattaattataaaaatatatttcttgttgttcctttgtcttgcatgtttcttcccaactcaagcattttactcaaaactgacctgagctcaatgtcagatttcttttcaacatttcacctgcctggattatatctgacagactcctctttccagctaaagtcgtgactgttgaagacaaaggcaggccaatgaatttggggacatggggaattatcttgttttcttacatcacattctacaactagaggcaattactttgtcactgcccttgtcttgcttctactcattttttggttttggaaaacaccatttaaccatgtcttgaacaccttaggcactactcacagatgcacatctcacttgtttctttgctgttgttccgagctactcatgctgtgctctgccc

SEQ ID NO: 93470 - DNA, 13138 bp, Homo sapiens
aaccccagaggcgaagtttgcagtgagctgagatagcaccattgcactccagcctgggtgacaagagcgaaactgcaactcaaaaaaagaaaaagaaatctggtttaaattcaaaatacctctgccctcagtagcaacaattttgctccccacactacttgagcagattggccttgtaatttttttttctcccttcttattggctgttgaaggagttttcttgctttgtcttgttttgtttctttataataaactttcaatgttatctacctcttataccaagggaccacattgtctagtgagggtatcacctttctcattcctaagtttgcatccttgaaatcatactacattatttcttaatatcttggcctttttatatcatggaaaaaaataattttctaatctaatttcataacaaaaagaatacttttactgaggtacacattccaatattaagcatagcactaaatatggaagaaaaaatattaaaaaaaaaatagcctcaaattctcaaagattgacctgagaaaactctaaagttattgccttatctaagtgactgtaagtagtaagcttcatacccttgatgtgatgaaaaagaatatgaatacgaaatacttttaaaaacttattgataattatatttggagattatttttcattttaatttgccagggaagatttgctatccaaggcatatccattattgatttgtcatataggaacttggtgaattggaatagaagtaagaataaccagtttattgaaagtaattagagttgctatattctgcatataatcactttttagtagatttttagattaatctgttactactaaagtttatttttagaaaattcaacatgaaatcattttatggcaaacaaattaaagactgctgtcatatttgttttgattaagaggttttgtgtttctttaataaaaaattcactttttataaaagtgaataaatttatactataaaaaaattgttcccattcacatataaaaagcaaatgtcttttctaacttgcccatctagcaaataggcaagaaaatatttatagttaaaaacttgagaaatttgttttctacactgaaatagtaagaaatcacttggtctccattgtttgtgttatattacttctatgtgtcctgatagtattataaaccatctgtcatcctgttgaaaagcaatactaagcaacagcaagccattaaaatgaaatgccagacacatagaacatgctttcttgcttgtacttcctaagtgttggtcttttaattactaaaggtgggttttcttttgtgaagttttttgaaagatcatttaaccatatggcagacagttttatgtttaatagcaagaaaaggaaaaaaaawtaggtctttcataactgaaaattaaaggtttacttcttgactaactttttctctcattgctggtatatattcctctaggaataaatggtttatgtagtttttcttctctggataacttcataagatagttaatatgttactgtaagaaaacttcctatcaattttcagagtatgtggacaaatatctggattccttctcttataaatcgaatatctcagaactctatttttgttacttttcacattgattaaaaatgtatgcatgcagacaatattgaaggctaccttgatttcaagagctaaaaatgttttatcaactatttcagagtaaagttctaaattataactggatatattttaggtataataactaccattttttaagtaggatgttattttgtaaaattttatcttttacctatatgtgaatgtaatgcttttgtgaatcttcttaagagtataaaggtagaaaaggtgtcaataagaagttcaattcaaaattaatttgaatacgtacatttgtgcctaatatgaaagtgaaaaaatatattcttgtgtgaacaagagcaatatgtatttatatagtggcattggtaccattgtgagcttctgattagccaggaaagttaatcagagaagttgaagtgttatacccttatgaaatatatcagagaatgagatcagtcctacccaaaatgtcactgtgcagcctaatgaggcaattgataaaatccttattaaaggagcaggagactcttacatgatagtttaaccggaatcatgggcaaattgtgaaactaaaatcatgagaactttttaacacatcataaaaattgtacacttccaagtaattaactttgcatatattttgtactcctgtaactgttgctcaaaatttaggaggacatttttttttaatgggtttagaatctatacagctgtcttctttctctcacacagtcactcagtaaataaatattgactgaatctcttcatcttggatatgttctcctgaatattctgggtatgggcatttttgctattaagagtgaattaaatttttgaaatgatccctagttatttggagaaaagtctaaaagaattagatgtttaactaaggtcgataatactttgttgggtaaaaastatgttaaagcactaaatctggttttcagatatagcttagaattgaatctaaaagcaattcccaaaaaggaatttcatatattttcttttggaatcattagaacaagaatatggtatcaaaaattttctgctttgcaaatgataatacccactagatacagataagttttgttctgtgtggtttttcagatcagcttcataagaacctaatttggtggtgtgatttaaatttcccaattcataacttgggatgtttatacaggtactgattaaacttggctctaatgtaattatttactttatttttttagacatccacagttatttcaggaaattcttctagtgccagcgtttcctcgtcagtaactagtggcttaactggatgggcagcttttgcagccaaaacttcctctgctggtccytcaacagcaaaattgagttcaacaacacaaaacaatactgggaaacctgctrcttcgtcagctaaccagaaacctgtgggtttgactggtctggcaacatcatccaaaggtggaataggttccaaaataggttccaataacagcactacgcccactgtacctttaaaaccaccyccacctctaaccttgggtaaaactggccttagtcgctcagttagttgtgacaatgtcagcaaagtaggtcttcctagtccaagtagtttagttccaggaagcagcagccaactaagtgggaatggaaatagtggaacatcaggacctagtggaagtactaccagcaaaactacttcagaatccagcagctctccctcagcatcccttaaaggcccaacttcacaagaatcacagctcaatgctatgaagcgattrcagatggtcaagaagaaagctgcccaaaagaaactcaagaagtaatgtggccaagtaggtttttgtatcatattagcctaaagatgaaaggcttattattatgatataatctgtaatacactgtaatttaataaaagtcttcataatcaaatttctattgtttcttaccttaaaatgctaartattatataacaaaacttggaaactttcattttaaatcaatcttcaacatttttattctaatgatttccatagtgtgtgaaaacaatgattagaatgactggttctcaatgagatcttcagaagattgaaagcatctgtgaatttaaggaaaaagaaatagttcatcttctagcaaagccccaagagttgatcctgatgaatgaggtgccttatgtggcggcagggacgacccaacatagttttctattttcctccccgtattctgggtgttcattttctgtgctagccccatttcaactgactctccctctccctcccaattatttcatctttttcaaaattattttttcattattgatttctcatatcaatggattttcctaattgatttatcatacttcatattatatctttaccttttttatcacctcatttcaattatttaagggtatatctttttccaataaattgtgaactctcctggtgcttaatacaatattttttctcacattgctcacttttcctacattgccaatgtaatacatgcacatagtacgtaataaatgttgaattttgattcatcttggttatgcacattcctgataagttttgaagaaaaataccatttcacaaaggtctttgcagatggaaatatatgacttgttcacacactgatggcttcttcctataccatgaaagaaaaggctatcttacttagtgctcaaaatgttatagcactttacctaattttagctaactttgtatacaataagctcctatataatgattaattcttgagattgttttgtacattgttaacccatttatgccagaggttgcaaatttttttggtgaaaaatcagacctgatgatgaccttgaacagtaggatataaataactctataagccgagcattgcaataatggaacactaggcataagtgggttaagtcagaaaatgtggaaggtctgcgttgttgtcttacttgcaagctaacaaattaaccagcaattgttgtacatgtatattctgagagaagataggaagccctctgcatcagagaaacagtttattattcacagcaaaaaaactggatatccaacaaattcacacattcacaagactatgaacagcctgttccatcaaacttgatttgtgctactaaatcttcactctacaaatctctaatctcaaactgtcttccttaatccctaggtttttctaacatcattattctaaagtatattgataggtgatctctgtaaacacaaagcttttaaaattaagcttggtctttttttttttaaggaaagattattattttaaactgctctgttaaataatggtgctaaattatttgtagtaaattagaatccaggattgagataatccattatctcaattatgatctcaataggcagtaaatgtctgtttaccctatatgtaaataatgaattatctcaatcctacagagacttttgctttgagaaacagatttattttgataaaacatcaatttgacataaaccccaatttccctttggggtcaaagaaaccaaaaaatacatatccataattgtttatagttcaaaaccagtttggactaaacaaaattacctgacataaaaactcagctccgcaactataacagttaatgtaacctccatacctacaaaaaatgaaagcagtaatgtttattacagttcacacattggcacttgaaatgaaaacatttatcccatcatggaaaatacgtgctacatagagttgagaagagaagcaattattttaatttctgttgtacctcagaggggactttagtttaggaggtaatttatctttcactgagtatggctctttgtatagataatgtgtgcacacgtatatttaggttatgtacatatgtataagtacacatataccgtatttagctcagtttggtattttatagaggtatatttggtattagagtttaaattgtctcaaggagcttttagaccttgatttttttcatgtcataaaatgagctacaagaccctttaactgagcagtaatgaaagtagccagttttatataaatagcatttattattttatgatcattttatttagtttgttatgtgcagatgttttccccactagaatttaagtggtatgaatggagggatcttgtttgtcttgcacagcattgtattcccactaactctcaataaatacttactggttcaatgaatgaatggacagataagcaagtgtgctaacaagtaagcttttaggattgtacattttaatcccattagtagatatgtggtgactatcatttttctattttgcatatgctttatgtaagattatataactacagattttagtgacttaaggaaaagaaaagggaaaacactaaaagaaaggccttaaagtcagaagacctggttttaaattccagtccctccatgtgaggtcctcaatttcctcctttataaaacacagatgaaaatgagatgtccttcaagtctacagtggatctgaagggagggctattattttctgtgagacgaagaagaatgtaactgacatggccatgaatccgcacaaaacagaatgcactgtgtttacatggggacattgcacagtcacaaagagaaattacactaaaaggcttcagagaggtaattataaagttttggtggcaaccaatgtggctcctcgtggtttggacattcctgtagttgacctggtgattcaaagttctcctcctcaggatattgagtcctatatccatctctctggatgcgtgggtaaagctggacagacaggggtttgtatatgtttttatcaaccaagagaaaggtcaactaagacatgtggaacaaaaaacacaaattacttttaaatgtgtaggtgttccttctacaatggatttagttaaatttaaaagcatggatgccataaggtctctggcttccatttcttatgctgctgttgatttttttccaaccatcagctcagatactgatagaagagaaaggggcgatagatgcattggctgcagctttagcccacatttctggtgtatcaagctttgaaccatgatctttaatcaactctgataaggggtttgtgaccatgactctggaaagcctagaggaaatacaggatgtcagctgtgcttggaaagaacttagaaagctgaatagtaatgcagtgtctcagattaccagagtgtgcctcctgaaaggaaatatgggtgtttgctttgatattcctccaattgagtcaaaggttacaggcaaagtggcatgattccggctggatactctcagtgccagctaaattacctgaaattaaagaatattatgatggaaacatcttttaattccagacagaggagtggctggtcaggccagtcaggtkgtcgatctggcaattggtcaggtagagagagtcgacaaagcagttgctcaggaaagtcggcaagatggtagaagacgaagtggaacagaaatagatcaagaagtgggggccacaaatggagttttgactgagtatttgatagttaatttagcagtgtgagcttgcctatttctacctaatcttacattatggatcaaaaattaggtcatcattgttgaggtatgtgtctactatttgcaaagaagttgatcgtatttttttaaaaaagtatttcacaagaatgattgtaaacaaatctacttatccagttatacctttgaataaaaaaacctccttttattgtctctttaaaaaaaaaaaaaaacaacaagaaaagaaagaaaaaagccctggctgaaggggaagtctatttagatggttggaagccttagaattttatttttggtttacactacctaggtttaagtccaggcccaccacttaatagcaatgtgatttggattaaattacttcacctttttgggccatggtttcttcataatgttttgaatattaaacaagttactacatataaagcacttagaacaatgtctggcatatagtgtgcattcagtaatgttacatgttaatatcaagttattcagttttagttcaaaacatataaacgaaacattaacaaaatatattatcaaagacttctagttggtggtatattcttcttatgtatatttggtgtatactctgatttatacatataggtgtataattcatattatccacatacgtgtataaagctacataatatatatggtttatatgtatgtatataaacatgtatgcatttgcaagagagcaatatgaaaaacaaaaacatttaaggcaaaatacatcatacagtaaaaaaaaaagtaaattgaaaaacctttggatccaacctttcttgatgataaaagaatataattactccttcaaaagatcttcacttttaaatagttgatagttgaagcttgggtcatttgctttgctatttctgttggcttagtatttctttcaacatgtatcctttataatacattcatgcaataatcctgttaggaagtacagtattcctgaaaacccagtacagtatcagtttctgtagttcagaggtttcttgctttctggtccaaagttttgtaatgtcagttttatgaggtagtcaatcaacaacttgctggaaaataaaagttgaaggcttattttcttaagcataagtcatctttccaaggtagttagctggcacgtatcctttctgcccttgagcttcagctaaccaccactctttattgccacttaggtcacaaaacctgagtatatgaactctctggtattcctgaaggctgagttcatggtcactccgtgcttgaaaagcatgaactgcatagaaaatctagacaaagaaacaaaagacattattggaattggaacctgaatattaagagaaacatcataaaagtttccaagcttttagaagcaatgctaaagtttttttgttttgccaaagtcacattgtccaactccttctattggatgtattttgctaaaatataacccaggtgagaatggagtgaaataggtattcctattattctgttaggaggaatataaattgtccatgcttgaaggcaacttggcagtttctattaaaagatttttaataatgttaaaatgttaattccttgtgaatcaaaatagcttgaagaatctcttctacagaaacatcggcagaaatttttgcataacaatgttactggattacccataagaatggcgaaaagtgggagagtagtaggaataacactataagtttagcaagagaaaaatagttaaattccagaccctcatactaaggagatttgtagtcattaaaaacggtgcaggccgggcgcggtggctcacgcctgtaatcccagcactttgggaggccgaggtgggtggatcacgaggtcagtagtacaagaccagcatgaccaacgtggtgaaaccccgtctctactaaaaaatacaaaaattagctgggcgtggtggcgtgtgcctgtaatcccagctactcaggaggctgaggcaggagaatagcttgaacccgggaggcggtggttgcagtgagccgagatcgcgccactgcactccagcctgggcgacggagtgagactctgtctccaaaaaaaaaaagaaaaaacacaaaacaacaacaaaaacgatgctttctgagactaataacatgggaaacacttatgataaaatagtaaaccttaaaaagaacataaaattagatgtacgatataagtctaatattattgtttctttgaatggtacaattatagctgattttcatttttacttccttgttcccttctttatttcccaaacctttataatgacaatgtattaaatttataatttaaaaattattttatggcctagaataatacaatatttcagtcaaaagaatttttctctgacctcaaaagaacaatttataattattaagtgcgtaagaagccccaaaataagtctttattcttccaacaaaatcataagattgataataaaaatgtttagttatggcataaaattaagcaactggcttagtttattcccattcatttatttaagcaatatttattcccattcatttatttaatgaaaatttttcaagtacctactaagtgctggttattattttattggacaacttacaactcagctaggaaaagaaaatgccagtgaacaaaacaaaacacaccaaaacagcaacaactctacacacagatgatacatcagctaatggtgagctgaattttgaaataagttatctttcataaatgacaaagctgacaaaaggcatgaatatgtcatatttgaaggtacggagatgaatacatgaaaacaacatataggaaaagacaagcagattaactctcaaacttgagattcaataggtaagggaaactatgagaaataagatgacttcattacttcattaagcagagaaagagaatgcgtagtgtggaaaggagactatagctgtagctgaagttgttatttaaatattaaactgttatttaacttttggtgaaactttgattcaattgattgggatattgatttatcaactaatatgagctgctccccaaggaaagaaccacattgctatggactgaatgtttgtttcccctcaaagtttatgtgttgaaagcctaatccacaaggtaatgctattaagaggtaaggccttggggaggtgattagccttcaacttcctgaatgggattggtttctctttaaaagaagcccaaaagagactcttcaccccttccaccatgtgagggcccaatgagaaggtgccatctatgaaccagaaagttgcccctcagcaaacaccacataaactggtgccttgatcttggacttccagcctccacaactgtgagaaataaatttctgttgtttataagccaaccagtttatggtgttttgttacagcagcccaaatgcactaagacacacatttaaacttttctccattgaccacattatggtacaaagtaggaattcaaatatttattgatttgacctgaaaattagtaggaatattcaaatatttattgaaaggcatggatatcatacaagacatcatcttgtatcataaaagatacatacaagagattgatgaacatggtcaaattattacataatttttttaagtaaagaagaaaattaaaagtactataaattctttagcaatggagtggtagcaataataaacaccttttacagagcgcatggcagttatatgttaaatgtgctttgtcctcaacaaccttatgagttatgtcttacagaagaaacatatttttaattatagagctaattggtgctgctatgaccaatatcttctaacttcaaatcctgtgcttggtccatttctcataatgctttagagaccaaactcttgttctagcaagtatgtacagagtgtattcttgcggagagggactggagtttctagtatattgtagatggtgttgttttgctgtgtagaaagtgaaaacattgaataaatccacaggaacagaatggaagatttggtttgcaaaagtattcgggaatgtaacgtactataatacatctgaaacatctgtaagagcctgcattagtggttggtaatcatcttttataatttttataaataataggtaatgctttacctatgcaactatagatttttttagcaggttagattgcctactaatagaacatttctaaatagtggtagttttttactttagcacaattctctcaagcgaaatataaactcttccatctagatctgtttggtatgaaattatagtttatattctaaatattaaaatatattctcatgaaattgtaaatttaaagtacaaaattatatactttcaatgctttagataatcatgacccaaaatttgtttaggatgagcactttttagtttttatataatttatgttaaatgggggcatatattatatactcaaaatggaagtaagctgcttttaaagagacagcagtctattttcagtctcttttttaagtctcctttttagtatttttagtctccttaatgttagactacaagttataaatttttaacctgtcatgcatttaagaactgaaagatttctcattatcttcaacattttaattgtttcagtctgtaactttctaatcttaaatgctaatatgttttggtccaggcacattaattacaatgttgttaatttgagccataatcacctaatcttcttctgtttttccttggcactttttaaaatgtattttattgattgcttctttctactctataaagctctgactcattttaggtgcagtattctgtgaatacaactcagttttctaccacacttactttttttataacactgtattattgactcatacctaatttattacccactgcttataaccactagatctttccctgtggtaacattcccagtttggcattcccttattctatatttgtgcatttgatttttccttcctccgtgagccacattacctgacttcactgaatatcattttatttttatcccaattctccaattaacagcaacaaaagtcataatatatgttaatcttctgttctaaaactaaaaggtacagaatcagcatttatggtacattatatgtatctctggaaaccaaggtagttgtattgcatgaaaaatgctcattattctctcttacccttcaggagcaagctttcatgttcttcacttaacaattatatgttttaattacacgagcaatttcgatgaagaaaaaaattttaagtaaagttaagcaaaacaaaacaaaacaaaacaaaacccacccaactgctattagtatcttcttttccttcctcccatcttcctctcttcctttcttccttctttccttccttccatttttgttttctacctacctacctgaagtggtaataaaaatggacttatagtatacataactttgcaagctgttttttacctcatactatttttgaaaatctcttcatgttaataagctgacttttttaagcactttctaaacaatgacacagtaggtatatagcatcatcatcataggtagctggaaaatgtaaagatgaagggccagactatgaacgtgggattggtagcaaaacgactactttttttagaagtcaaaaattatattttcaatattacttatgtggaaaaagaaaacaacactgattctcagacactgaactgccccccaaaactgggttttagccgttattaaacctagtcctttttgagaagtgccaaggacaagattctgcttgccaaacaaggcatcttagacactctggaaggcagaattctaggatggaccccaagaatcccaccccctattgtacatgttctatataatctcctccccttgactgtgactggaacttcttaatagatgtgctattactcctgtgattaggctacactctatagcaaaggtaaagagattctgcagaggtgcttattaaagtccctaggaaattgactcggagttagtcaaaagagggattatcctggatgggcctgacctactc

SEQ ID NO: 93471 - DNA, 13940 bp, Homo sapiens
agttggaataaaagattctgacctggccgggcgcggtggctcacccctgtaatcccagcactttgggaggccgagacggggatcacgaggtcaggagatcaagaccatcctggctaacgtggtaaaaccccgtctctactaaaaatacacacacaaaaaataattagctgggcatggtgtggggcgcctgtagtcccagctgctcgggaagctgaggcaggagaatggtgtgaacccgggaggcggagcttgcagtgagccgagatcgtgctactacactccagcctgggcaacagagagagactccgtctcaaaaaaaaaaaaaagattctgacatttgacctggtggttttgtttcttctttttttttttttgagatggaggagtttcactctgtcacccaggctggagcacaatggcgtgatctcggctcactgcaacttccgccacccgggttcaagcaattctcctgcctcagcctccagagtagctgggattataggcgactaccatcatgcctggctaatttttgtatttttagtagagacacggtttcaccatgttgaccaggctgcgttttgtttctaaataccccacagaagtcctcaccccacataaggaagcaggttcaaggacactgataggagtaacccattggaaactaccaaatgaacagtaagaggctagacaagtgaatcatggtgcatcagcacagcggaatactatgcggctgtcaaaaaggatgcagccctcttcaaggtgtagtattcaatgcaaaaagcaaggagaaaacaagaaagacttttttatatgttcagtgctggacttgtagtaggtgagcaactgataaatgttgaatgaataagtagaatctttctgaaaagacctatgagaactcaggagcagtggttgtgtatggaaagagacctggataagggaaatctcttttactctgttacactatttgcattatcatatgcaaatatctattcaaataaataagcttttgttatttaaaaaaccattaaaattcaaagtgctcatataaaaatctggatgtgattaggccaggcctagtggctcacgcctgtaattccagcactttgggaggccaaggtgggaggatcacctgaggccagggcctggcaacataatgagaccccatctctacaaaaaaattaaaaattagccaggcatggtggtgcgcatctgagtcccagccactcaggaggctgaggctagaggatcacttgagttcaggaggtggaggctgcagtgagccatgattgtatcaccacactccatcctgggggagagagcgagaccatgtctcttaaaaaaaaaatctggctatgagtctcttctagaaatacaagaagaagccctggacacaccaggccctgtttctagggataacaatggccagagctgaaatgtgtctgtccttcagcccaggagtccaaggtgcccactgtcctcacctatctggaccctacaggcctctgcactgctgatcccaggtctatgctgaaaagctaaggcttattaggtctgcagagtgaggagcagggctgaaaaggcttccccaagataaggggttgttacttagctctcctttgctgatttcactctcaactccaaaggccccatcaaggccatgacaattctaaggcaggtgaatgttggtgttgacatcacaagcctgctaatcttgcataagaatctgttaactcagtgtcagtggggactcaatggcctttggtctcacttcccataccagggcctgagggttttaattaaattcaaaggcaagccctggagagaggatgccaccagtagccccttgggcagcttggtccgagggtcttgacaaggaggtggatgacaaggtgaggacccagtgattgaggtgcagctgcaggtaggcaggccagcttacatcctgactccagctccgaaactttgaacaagtcaccttcccaatgctcagttccctcatctgtaacccacagctaatattacctgcatgctgtttccaggaacaggtgcctctaccaatcacagcagcagcgtctcactgacctttccactcattgagtggaaagtatgtcagggttctccagataaacagaaccaataggagagagagagagatggattttaaggaattgggtcacatgatcgtggatgctgataagctggaacttggtagggcaggctggctggcttgaaactcagacaatatctctactttacatcttgtgacagaacttctccttttccaggaaaccttggtttttgctctgaaggccttcggttgattgattgaggcccacattactggtgataatctcctttacttaaagtcaactggttttagatattaattgcacgtacaaaataccttcccagcaacatctagactaggttttttgtttgtttgtttgttttgttttgttttgttgttgttgttgttgtttttgagatggagtttcactatcgctgaggctggagtgcagtggcttgatcttggctcactgcaacccccgcctcccgggttcaagtgatcctcctgcctcagcctccagagtagctgggattacaggcacatgccaccatgcccagctaatttttgtatttttagtagagatggggtttcaccatgttggccagggcctcggcctcccaaagtgctgggattacaggcatgagccaccgcacctggcctagactagtatttaataaaacaatgggcaccatagccttgccaagttgacacacagcatttagccagtatagaaaatatcactccctttctgtgcatgaggaaactgaagctcagaaaggctgtgccaactgcttaaggacatagagcacacagaggatggaacggggagtcgaacccaggcagcgcactgcctccacactctgagaatggggctgcaggtagctgcttcacagggggcctatgagagttgaaacacacagtacttggtaccacactacagtagagacacaattcaatttggtagtgactgttattactactactgttaacacagatcattcaataagggggtggctgtgggagcagggagaggagacagggaggagggggctgctgttccccaccattggagatgggttttagggtgacagaaaaccctttcctctttccagaagggcccgctttcctccttctaggaacctccaaggagagagccaaggagggtgggaggcctctgccaggctgtgggccctgggtgctgtgcaactgggcccagagcagctggccaggtccaggggagagagtgagcagtgtccaccagtgtgtggggtctggaaggagtcctgccttctgaggatgtggctggttgcccagaagttcccggaagtgggcaacctctcctgagttgggtggccggcagctggccagagccttggccagcctccttggctaagtgctcccatctgcctgcccgaactagtcctgtcacccagaaacagagaaatgcctcccctgagacccaagacccttgaagctgccccagcctcattcctcccagcttcttcaccccgcccccacagggtggagtgctggaccagaagccagaagggccaggaggtcagccactctccccacttgctggctgtatgaccttgtgcaacttaaccattctgagcctctgttccttgtatgggactgacatctgtagggtgcactgtgtggggggtctggggttgtgcacttaatcacagagccaggtcaaacatttgcacacagcggctgctgctaccatctttgctcagcagattctcatgctccctggccttctccttactggccctgcccagccgatccacattcactctcttctcactcctcctcccctttgttccagctcccttgtgtccgggcagaaggggtgctgggtaggcctttaaatgccaacagggccagagagaaataaggtccctgaattggtggataattgcactgttgattatggcgagattctaatgtctcccggcctggatctgccaccccccacccccgccccgttctcttgacttcagcctccctgtcttcctccatgctccttctccatatcaggctccctctagccttcactgggggcccctcagcctggtcgctctgtcctaggtggcatctgcttgacaccagggtgcagccctgaggtgggtcccccttcccatcccgccattctctaatccagcacccttgtccacactggtcacagactgctacggcttctttgctgatgtctgtctgcccagcagctcaggaggacagggagggaggcttccccgcactgcacatcctcatcccgccaagcccctgcatgtggatcaggcagaccagggccccttgaaggtgatgaggcaggggcaggcacagccggccataggagagggctcagcctgtgcctgcccctgccccattatcttcaaggggccctgatctgcctgatccacatgcaggggcttggggggaagatgacaagcatggaggaatccacctctgggctagtcccttccaggaggccccttatagctagcctgatccttcccctagccactgaccccagaccctcctccagaagctgtgagtgtagtgtggaagacatagaaatcaggacacctgggtccccctacagcccaacatcactttctgtgtgacctcgagcaagtcctctcccctctctgagtcttagtctccctggctgtaaaatggcttagggctgggaacacacactgatgcctacaaggccagggaggtgtcgctgcttggacattacattcctcagggttggggacgcactgaagggagagctgatagagaagtggagagagcacaccctgcctgggctagcccaggggctccaggtctactgattcctcaaaagaagctgaacatctgaggcttgatgagaaaattcctgctggttaaatgttgacaatgcattcacattttattataaaacaagaatgccgggcgcagtggctcacgcctgtaatcccagcgctttgggaggccgaggtgggcggatcacgaggtcaggagattgagaccctcctggctaacatggtgaaaccccgtctctactaaaaatacaaaaaattagccgggcatggtggtggacgcctgtagtcccagctacttgggaggctgaggcaggaggatggcatgaacccgggaggcggagcttgcggtgagccaagattgtgccactgcactccagcctgggcgacagagtgagactctgtctcaaaaaaaaaaaacaaaaaacaaaaaacaaaacaaaacaaacaaacaaaaactacgtgggccacacaacttatctgggccacagtttgtgggtgctaggctggagggctgggttcaggggtcctctggggctctctgggcattttctgctctctaggatgggggctgctgctccctgcaaagcccccccactccagacctatctcctgaagcatttattggctttgctccactccagcccctctctctcttctcacaaaccagagctcaccccttgctctgcaaccacagtctaacgggattccaaagacagggttaggacaaggccagcgccagagacctcagaacccttttgctctgccaaccccgaaattccatctcacatggtggctcctgggccccatcatggtaaactggagctcatgcctccaactgttcagggcagagctgggctgtttccagatcctctacccactgtgtgcggctggcccccatctaccactgtatagaagggcactgacaccccaaggagcagcagcagcacaggttggagctgtcctatgtccacctggggtctctttgagaaggatgcaagatttcttgcttgactgacagatgtggaaactgaggcccagaagaaagcagcaggtttgccaagactgtgctacctcaccttcttggaggagtgctactacaaatagttcctgggagaaggggtcctggtgatgagtgctgcgttctctccctgagtccactcgcccgcctgccaccctccaccgtcgcaccctgcaaacccacccctctcctgtgctagaacttgctaacaccagtaccatgccctaccaatatccattgctgaccccggagcagaaggagctgtctgacatgactcatcgcatcgtagctctgggcaagggcatcccggctgcagatgagtccactgggagcactgccaagtggctgcagtccattggcaccgagaataccgaggagaaccggtgcttctaccgccagctgtggctgacagctgacaaccgcgtgaacccctgcatcaagggtgtcatcctcttccatgagacgctgtaccaaaaggcggatgatgggcgtcccttcccccaagttatcaaatccaagggcaatgttgtgagcatcaaggtagacaagggggtggtacccctggaaagggcaaatggtgagaccaccacccaagggctggatgggctgtctgagcgctgtgccccatacaagaaggatggagcccactttgccaagtggcatcatgtgctgaagattgggaaacacaccccctcagccctcaccatcattgaaaatgccaacatcagctgggcgcggtggctcacgcctgtaatcccagcactctgggaggctgaggtaggtggatcatctgaggtcaggagttcgagaccagcctggccaacatggtgaaatcccatctctactaaaaacacaaaaatgagctaggcgtggtggcacacacctgtagtcccagctacttgggaggctgaggcaggagaatcrcttgaacctgggagacagaggtcgcatgagctgagattgcaccactgcactccagcctgggtgacagagtgagacgccgtcttgaaagaaaaagaaagaaaagaaagaaaaagaaagaaagaaagaaagaaagaaagaaagaaagaaagaaagaaagaaagaaagaaagaaaraaagaaaagaaagagaaaatgctagtgtgtcaatgtcctggcccactatgccagcatctgccagcagaatggcattgtgctcwtcgtggagcctgaggatcctccccagtggggaccatgacttgtagtactgccagtatgtaaccgagaaggtgtggctgctctacaaggctctgagtgaccatgacatctacctggaaggcaccttgctgaagtccaatatggtcaccccaggccatgcctgcatccagaagttttctcatgaggagattgccatggcaactgtcacaagcactacactctggggaataagcggcctagaaggatcacaactgggccagaacagggcccacccagactcatcactgaggcaggtggggtcattctcacttcacagacacaaaaactaagtgctgcactgcacagtgycccccactgtccctgggatcaccttcctgtctggaggccagagcaaggaagtgtccatcaacctcaatgccattaacaagtgccccctcctgaagccctggggcctgaccttctcatatagctgagccctgcaggcctctgccytgaaggcctggggcaggaagaaggagaacctgaaggctgtgcagaaggagtatgtcaagtgagccctggcagatagccacgcctgtcaaggaaagtatactccaagcggtcaggctggggctgctgccagtgagtccctcttcatctttaaccatgcctagtaagcggaggtgttcccaggctgccccccaacaccccaggccccatcccctcccacgctctcttgaagagggggactcctcttcggggctccaggctggcttgcccgcgcgcttgcctccctcgtgacagcggtgtgtgttgtctgtgaatgctaactccatcaccctttctagcacattgctaataaacagctatttaagggagaaaaaataaaaataaaaataaaaatagttcctggggcccagaataaaaagggggaattctaggggctggggttgacattttccttttgccttgaccattgggtgggtactatgtgcagcagccccggacggtgatagtgatggtaatgatgaccatgatgcagactgggtgggagggaaaaaagtccccagcgtcatccctgggatggggcctgaccttgcctcaactccagctgcccagggccagagcgagtgataagatgagtttatactgtagctctgagaaggaagggagggagggagaaggagggaaggagggaaaagggagggaggggtaagggagagagaaaaagggagagaaagggaaaagaagatggggaaggagggaaggacaagggaggagtgagaggcgaagaaggagaaggaaaagaagaaaaagaaagaagaagaggaggagggggcggaggggagaagaagaggccccgaaggatcacaactggagcagaatagtgcccacccagactcatcactgaggcagatggggtcattctcatttcacagacacaaaaactaagatttaaggcatgaggcaatttgctcaagatctcagagttaggactagaactcatggcttatgccttgctcttcaaggtctcaaaccttgaaccactcaagaaacatattccaagatacctcacccttacctcatcagaaaggggagctggttaaaatgcagatttctgggtcaaaatcaaaggtgtgtggcacaggaatctgcattttgaccggtaccctgggggtggttctttgggccctgacactgggaaaccccgtggctcatttagggcctttctggtctgacctcttggcgtcaggtcctgaccatactcccgttgcccagctatttgggctgactcacgctgaccccccaaccgccacccccacagggctgagccttttccatccaaggcttcacccacagtctcccagtcgcatgtagatccacccttccaaccagcacccgcttctcttctggaagccttcctcgtggttgggatcctcctctttcagcgcctgttggagtaatagcctcctcctcttcctccatctggagttgcttacaacactctatttcactttccatgtgagtcggccttgtttcccaatctttctctatattaaacaggaaactcccagagggctagggactggctggtttaaacaataagcctctgaaatacaggacttcacctgaccctcctgccagccacaagtggcagggcgggagagctttacaaatcaggaaaccaagccttgaagaggttgtggcctgcccaagtctatggccaagtaagattcagagctgggtttgaaacccatgcccaactccactatccagttctttctgctttggctttggctctgatcacccccmaaaaaaccctatgagggccaggcgcagtggctcatgcctataatcccagaactttgggaagctgagggtgatcacttgaggtcaggagttcaagaccagcctggccatcatggtgaaaccccatctctactaaaaatacaaaaattagctgggcgtggtggtgtaatcccagctgctcaggaggctgaggcagaagaatcgcttgaacctgggaggcagaggttgcagtgagccgagattgtgccactgcactccggcctgggcaacagagggagactctgtctcaaacaaacaaacaaaataacaacaacaacaaaaacaacctgtgaggcaggcatttcagggattatgatcctattgcccagataaggaaagcaaggcccaaagatgagcaaagcactcaatatcatccttattctgttcccacttccagctgcacttgggtccaagtccaagtgctgaccttttctctctcatcttctctgggtgatgggcactgcccaggatctcttggctgaatggcacagaactgggtctcgagctctcagaccaaagccctcatcctggactggtcccactgccactctgaacccaggtgcctcctctgaaggtggagactcacctcacctgccttgcagccagctgggtgctcagagacagaaatgcaaagtacctggacacaccctggtcaccatcattctggactttgtccctcttgttaatgctcagctgggaaaggaataccctcaaaggccctttcctcaagaatggaggagagtacctctgagcctggcacaggcccagcccaacacagcccaagccaagctgggaagggtgtggggcaaggaagccagactgacattcctgagacgggtttgccaagccctacactttatgtgttgtacccgggaaactcaatggaggtatggcccaacgctgacctttggcatggaggcctaagccaccctgctggtgcccagggtggccagcaaggggcttcagacaaccctggatggaaaataaaaatagtggctaatatttgttacacgctaactattgtcaggccctgtgccttcccctcctccccaagtgctcagagctgtggagtggatgggttccaccctagccctgttcctctgtcccctctggatcatcttagaccagaaagtgccacagctgagtgtcccgcttcttccgcatcctgccaggaccactccatttgtgggcgatatagccagctccacctcctccgggaagcccttgttcacagtttccaaagcaagccgcaggcgggatggatcctgcttaacaccccggcccagaaccccttggatctccttcttcctccatgtccaagacacccagcttaacaaccctgtagcccccaacttggccctagcggcacctcgcctcgaccttgccattttatactcaattggggcgtagggttctgaagcccagggtagttggtggggaggcagcacgagggtgcaggatgaggtcgggaaaagagacctcgtccgcccaccgcctagcgcttcctcctccctgcaggcgagccggggaatccccggcagcaccgatatccgcagagcccaagaagtgggcctctctgccccgcccccccggctcgccgagggctacgcggcgcgcctgcgcagaagaaggcagcgcccaaggcgcatgcgcagcggtcactcccgctgtatattaaggcgccggcgatcgcggcctgaggctgctcycggacaagggcaacgagcgtttcgtttggacttctcgacttgagtgcccgcctccttcgccgccgcctctgcagtcctcagcgcaggtgagggcccgcgcggtaggtgcggcgccggccgaggaagccccggggtgtcctgccagccgtggcaccgctgccccgggtgctgggaccccatcccccactgtcccagtcacccgccgccttgaggtcagcgtttatcctccagatcttttgcctagacggccgcctcagtttccccctttcggccccttccggctattcccggttgaacccgccgctttagaattcccttctcatacccctcccgtcattctcgagacctcgaccgcgggtcacctctgacccccactgccggaggactgccttctttctccagactcaactccctcgactttataagcccctgcgcgtccccagtgaggcccaaggcgctggccctcatacccctaccctcatttgtgcccctcctttctcagttatgcccagttcttcccgctgtggggacacgaccacggaggaatccttgcttcagggactcgggaccctgctggaccccttcctcgggtttaggggatgtggggaccaggagaaagtcaggatccctaagagtcttccctgcctggatggatgagtggcttcttctccacctagatgtaagccaagatgtcttatctgcactgtgcatctccctaagaaacctctggcctcccaaacctgttcttgacctttccctcatccttccgcccccttgattatgtactgtcagtattcatttggtgaagttgctttgcaggtgcctttgtgtagcgctggagaatgaagaagttggtgacccgggtaaagtgtggtcaccattccttagctcacatcagtgctgtccttaggcatttttgagggagaagtgttagtattccagggtaccctttatataaactgcggttgacacctgaatccagtgagcttgcagtgatatttgcctgattattaacaactgttgatgtcactcttcatcagtctttccacaggagccagcatacttcctgaacatggagagtgttgttcgccgctgcccattcttatcccragtcccccaggcctttctgcagaaagcaggcaaatctctgttgttctatgcccaaaactgccccaagatgatggaagttggggccaagycakcccctcgggcattgtccactgcagcagtacactaccaacagatcaaagaaacccctccggccagtgagagtaagtgtcattgacaatgaaggagcaggtatgggtgtttgtgctcattggtagactagaagcagtccccacagtggtggtgagggtcacactcactcacagagggctgctatgtgcaggctgggctctgagcacagattatctcatatgattgtccccccaagggtaggcacttttagcttttccatctttaaaggtgaaacagtggccagtgttgcacattacaggtttttggattgcacgttagtgtctataggggttttagtgtttcctcagtgcctcgttcacataaatattaaattggaatgttctaatttccctcattaaacatttagccttctaatttccctcattaaacatttggccttcggctttttatttatttaatttttcttttttgagacagagtcttgctctgtcgcccaggttggagtgcagtgatgcagtctcggcttactgcaacctccacctcccaggttcaagtgattctcctgcctcagccttccaagtatctggaattacaggcatgcaccaccacgcccagataatttttgtacttttagtagggtttcaccttgttggtccggctggtctcaaactcctgacctcaaatgatccacctgcctcagcctcccagagtgctgggattgcaggcgtgagccaccgtgcccggcccctttggctttttaaagtagtgattttttttttcttaaaagtttttgttctgttgtggtaaaatgcccaagraaaattaccattttaagcacttaaaaatgtgcagttcagtggtacattcatattgttgtgtcaccaccaccatccatctccagaacttttttcatcttcccaaactgaaattctatacccatcaaacagtaactctccattcctctctccccaacccctgacaaccaccattctgctttctgtctctatgaatttgactattctaggtacctcatataagtgaaattgtacagtatttattagtgatttttaaaaacaaatttatcttggctgtgtgcagtggctcactcctgtaatcccagcgctttgggaggccgaggtggtttgatcacctgaggccaggagttcgagaccagcctggccacatggtgaaaccccactgttacaaaaaatacaaaattagctggatgtggtggtgtacgcctgtaatcccagctatttgggaggctgaggcatgagaattgcttgaacccgggaggtagaggttgcagtgagctgagatcatgccatgtatctttatttgtatatacatttgttgttgttgtttttaacaaagagactagagttgaatttagtttgctctgcttctgataggagagaacaaagcttttcaggttccacttaatcccagagaatattttacaggtttttcttaggcgtgttctctgggtgtgggcttgtaagaaaataagttttttttttctttaagcagaaaggatttaatcctttgtagggtttattttcaagagttagttacgtcttttttaccaaaatgcttgcaatggctatgttttaaatgata

SEQ ID NO: 93472 - DNA, 13098 bp, Homo sapiens
gaatcacctacacagaacgtgagcatttcacactgggggaagtgaatgagtagagacagatggagcactgagcatgccctgagatgctctggagagagaagcagcttttcttctgtttgataaagttgatcccaccttgcttttttttttcttttttttttgagacagggcctctctctgtcgcccaggctggggtgcagtggccaggttggtttcaaactcttggcctcaagtgatccgcccacctcggcctcccaaagtgctgggaatccaggcaggaggcaccgcacccagccccaccttgcttaaagactctgtaatagctaccttaatgatatgctaattttcctcatgtcatttctactggacctaaacctataattatatccatttatcccatgaggccaattacaaagtcgaaccctagagaaaacacataccaaaaccaaaaaaaaaaaaaagcttttcaaattttgcttatttactcagaaaacctgagtaatactattcgtgagaatggattctgtggatgatagatcatgctagattgggctacattgtaacaagaattcactttagagattccaaagttaaatgattaggcaaactaggagaggttctaatggtttgccctaggacataattctaattatgtcctaaaatctggactcaatagtgacctacactaaataaagttgagatgtcaggaattcctgagtacaatgtaaaagactgtctccccagccactccagtgcctgcttgatagcttcaggaaccccgtcatcatggaaggaggaatgaaggggacacttgggctcagcaaacagacttcacaccgaagctaatctgcctacgaccatggctgagagcccaatctgtcaactctgagcttccagtacggtacaggaacccaaggagattagtttggcatctggttagaaggttacaaagagccgggcgcggtggctcacacctgtaatcccagcactttgggaggccaaggcaagcggatcacctgaggtcaggagatcgagaccatcctggcctatgaacatagtgaaaccccatctctactaaaaatacaaaaattagctggctgtggtggtgtgcgcctgtaatcccagctactcaggaggctgaggcaggagaattgcttgaaactgggaggcggagattgcagtgagctgagatcacaccactgcactccagccttgcaagagatcaagactctgtctaaaagaaaaaaaaaaaaaggttacaaagaaccactttcatcacagaaatgctgcaatttctctccactgagacactcattctggctatggattagattcccctgcatggtatcctttgcagacatactaaataccttaatcatgaccataatattccacccaaaggtgcttttatttatttatttttgagacagagtctggctcttgtcgcacaggctgaagtgcaatggcacgatctcagctcactgcaaccactgcctcctgggttcaagcagttctcctgtcttagtctcccgagtagctgggattacaggctcctgccaccacgcccggctaatttttttgtatttttagtagagacgggctttcaccatgctgggcaggctggtctcgaactcctgacctcaggtgatccgcctgccttggcctcccaaagtgctgggattacaggcgtgagccactgcgccaagccccaaaggtgctttttatgaagaaatttattttacaacgaaagtaataatgcaataagccagtgctcacaggatatatggcaagaccagtgaatgcttttgctgtgaagcaggtaactttatagaatggcagaatggccttctgaactctccagtaccagccaagagacagcactttgtaaaactgggtgttgtcctaccatgtgcaggacacatgctgttaacaggaatcgaatggtatttcgccaacaaccagaatttatgtctgggtatcaataaataaaagtgagtgtgacaacttccactttagatttttcgatccaattgcaaaatgtttgtttgccatccctgtgattttagattctgctagtttagaaacatgaatgtccaagagagaaatgtttcatcagagcaatgcttctaccagttgaggctggcactcaccatttcaggctccttacacaaaatcactaaacaagcaaataatgggtaggggcaggggggaggrgcagtgttaccattttatctgaggtcattgatcctgagcatcaagggaaaataggatttgtactacatgaaacaggcaggtaggaatgtttggaaattaggggatcctctgagggctcttctcatactgccttgtttaatggtgaaagttaccaaaggactagagcaaccctagagaagtagaggaccatcaagggctccaatccctcaagaataaaggtttgggtcactccaccaggtaaagccaaaggtgtggctaagggcaatgggaacaggagataagtaaaggtcaactatggccttatttttctccttccttggtgggttttaaatatataagtatgtatactaattctttttatgccccttcatccttctccaattattctatataattggtcagttacttttacaatttatatataattttcgggatataaagatggaatggtaaacatcaaacaaaaatcttgaatttagagctaactgcaataaattgggatctggggcttcctcttttgaggagggagtagcatgttttgtataagggatagtggcatggctgttcaggttggagatgtgaagatagagtaagggtctatgttgaccttgcacagccagaaagtgaactgcagggaactccrtcatttgagcctactttgagtctttcaaacacactctccccactttaatcactccccaagtgttaatccttcatccctcatatagaataatttttatatagtgcattgaaattaggctatcaacaggtgtattagcttctaccaatcagagatacatacacaagactttattttgaaaatgagttttctatggctaggcgcagtggatcatgcctgtaatcccagcactttgggaggccaaggcaggccgatcacctgaggtcagaagttcgagaccagcctggccaacatggtgaaaccctgtctctactaaaaatacaaaaattagccaggcatggtggcaggcacctgtagtcccagctactcgggagtctgaggcaggagaatcacttgaacccgggaggcagaagttacagtgagctgagattgtgccactcactgcactccagcctcggcggcagagtgagactctgtctcaaaaaaaaaatgaaaatcagttttctgagaaagaccaagacaggtatttcactggctcaagggcagcaaaggcagcctggtgatgaagtcagtggtgatggcagctgtttccaccacccacggcagaggctatgttatggctccagttcttttacatgctcaattttgaggtatggttctgggagctttccaaaaaggtaagcctagcttctctaaaacttctgtgggtttcaaatagcctttgtgcttcccttcctacttaaattatctagcatgcattccactgttagaacaaggaaggctgatgcatataggaaagtttcatagctgtgcgcctgtggacaattggccctgccactctcagcctcagtttcctcatctttgaaaactttcaagcactgttgtaaaaattagaaacgttacaggcaaagtaacttatatctaggaaatacttacatcatgacttctcaattcatcaaaatatattcaaagtctacttcttttcatgtgacccagggtcattattatcgtgcacctggactatttcagtcacttcttaattaatctttttctactctatcccctccttaccctcaagtctattctcatcacaatagccaagatgacccaatcaaaatttaagtccacttcagtcactcttttgctcaacatgacctaatggttcccagtttccgtcctactaacaattcctttcaacagcctacaggacctccaaggccatgccccctaatacttccccgatctcatcactttctgcccgttgttcattccctcctagtcagactcacctccttcctatccttttaacatgatacccacactcattctgcaggccttagcatgcctgttccttttctctggaatactcttccccaaaatatttgcatggctcattgcttcatctcctccaagtctttgctcaaatgttgcctctcaagaatgcttaccctcaccatcctatttcaaatagtaaaccctcgcacccccagcactcctcatcctattctatttttttctatagcacttaccacattctaacaaaccactgaatttactttattacatttttgcctgactttctacaaagactgacatttttgtctcttttattctttgacatttccctaatgcctgtaactagtacctgataaatatctgtgaaatgaataaattgatcaaatgaataattactgctcctacaactgctatcctcctgcatacaacatatggtaccatataaatatttggtatttatacatgacatatggtacctaataaatacttgtggaatgaataaactgaatgatcaaatgaatgaatgaatgaatgactgtttctataattgctgtattactactactgctactaccactactgcagccctcttccttggcccttccaacttcattttctacattcaccttgaaaaattctgcctgagcaagaagtcagattcagagcaggaagttactgagccaacagcataatctttcctcaggttcctacaactgtaatgataactatctcaagaacacaaagcttttaattctgaaatgcaattttgtttgggggataggagaaagagaaggtagaaggaaggtactgggtgttttcatttgtttgtactaaaacatgccctggtcaatgaaacctaaaatgattcatgctagatgtgcaacttgtaaagaattaagaggtaaggtagatggatcccccttaaattttgagaaaatcagtgatgcatagagctcatgccacccaacgtggcaacgcacatgaatactaagttcaacctcttgtagtggatggtcagggacattggtgataacaaagatattcatgagacaactggggaaatttgaatgctgactggatatttgatattaagtaatgatctattattttaggataaaggtattgtggttactgatatatgctgaagtatttatgagagaaatgatataatacctgggatttccctcaaaatagtcaagcttcagatggggggaatggaagtgtgtagataaaaccagactgcgtatgtgctgataaccatttaaactgggtgatgggtacatgaaacttcattacactattctctctactttcatgtttgaaaatcttcatagtaatgtctttaaacatccttttaaatctgccaggctataggtagatttaaaaattttctgactgacaattggttgagtttatctgaagacctgggataaatagaaaggaaatgtctgggttaagataaaagattgtggagaccaaagttcttatttgcagaggaagtcttcaggtagcaggcttcagagagaataggctgtaaaacgtttcttatcagacttaaagtctgtgttgatgtgaatgcctgagaggtttaatgaggcatgtccgacccccacttcctatcatggcctgaactggtctttcaggtttaattttaagagtgcactggccaaggacaaagtccattcagatagttgggggacatcttagaattttattttgggttgacagctgagtacctatttcagaattgtgataatgcagttgaagatactctagtcagggctctccgctcctcccatttgacagacagccatatcttctcgtgtagcaccagccacatcctgagataccatggttaaggtgaaggccagagtcaacagatttggccacattgggcaccagatcaccagggctgcttttaactctggtaaagtggatattgttgccatcagtgaccccttcactggcctcaactacatggtctacgtgttccagtgtggttctacccatggcaaattccatggcactgtcaaggctgasaatgggaagcttgtcattaacggaaatctcatcaccatctttcaggagcgagatcccaccaaaatcaaatgggacaatgytgacgctgagtacatttgggtgtccaccggtgtcttcaccaccacagagaaggctggggctcacttgcagcagggagccaaaagggtcataatctctactccctctgctgacgyccccatgttcatgatgggcgtgaaccataagaaatatgaaaacagcctcaagatcatcagcaattgcctcctgtaccaccaacttcttagcctccctggccaagctcatccatgacaactttggtattgtggaaggactcatgaccacgayccacaccatcactgccacccagaagactgtagatggaccctccaggaaactgtggtgtgatggccacggggctctccagatcatcatccctgcatctactggtgctgccaaagctgtaggcaaggtcatcccygagmtgaatgggaagattactagcatggccttccgtgtccccaccaccaatgtgtcggtcatgcatctgacctgccrtctggaaaatcctgccaaatatgatgacatcaagaaggtggtgaaasaggcatcagaggcccctcaagggcatcctggactacactgagcaccasgttgtctcctccagctttaacagtgacacccactcttccaccttcaatgatggggctggtattgccctcaatgaccattttgtcaagytcatttcctgttatgacaatgcatttggctacaacaacagggcagtggacctcatggcccacatggcctccaagaagtaagacccccagaccaccagcctcaggccctcagctgctaggaatcccctattgcactaggtctcctaccacactgagaatctcccctcctcacagtttccatccagaccccctgaagagggaggggtctagggagccccaccttgtcatgtaccaccaataaagtcctctkctcagccaaaaaaaaaaaaaaaaaagatactctagtcagcaggattccatgattttcaccaacaatattcagctgctaggtataggtacaggtagagacttgggtttaaaaacagagctgaagtttcatcaagtgggtacacagggtagctaaggatatttataaaggaatggttgtagtgctggaccactgcatcttagctgagtaagaaggcaaggagatgagggcaatatgtatgaacaagcagtagggtgaaaggataaggcttccatgagattagaggattgtttgaaaggaaacactgcagtcaatgaactgaaaggaagccataaaatctagatttgggaggtagtaatgacatagtagaagggtatgacttatgaatgagtagacatggaggacaggaggtcttttgggggctgaagaaatcaagggatgggatgggtcaytcatgtggcattaaggatccaagaatgaccacagaaggaacaagagaaaaaggctggaagccaggtgccagagttatcaacgaaggaggaggggtggtagggaggtcagtaagattgcccacagtaagttggggtgacaagtggaaaagtctgataactttaaagaagctgttttatttgttgtttaatagaaaaaagacttgaaagggtgcaatggagcacaggaacatcacctctgttaggaccggcagtagctagggagggagcaagtcagccttgagagggctgcaggggagacattctactaggggaatagaagacaccagggtttcagttaaagtgaaaaatgaagagaaagcacacacagagaaaaagtgttttggcaaattgctaataacagaccgtggattatagagaacacaaaagacaggtgtgggaggccatggaagagttgaaggtggggttagattaggtagtggttctcagtcctagccgcacaacagaatcatctggggaacttttgaaagtactgatgcctgcacacagatcaactgaattagaatctctagggggtaaggccagggtatgtacagcccagtaaccaaactttcaaatacagtcatcccccagtatccatgggcgatcagttccaggatccctgtggataccaaaatccacaatgctcaagtcccttacagaaaatggcctggtattggcatagaagctacacatatcctcccatatgattcaaatcatctctagattacttataactaatacaacgtcagcgctataaaactagttgtttagggaataatgacaaggaaaacaagtctgtattgtacatgctcagtacagatgcaaccatccactcttttcaattttccaccccaggctggccgaatccatggatgcagaacccacaaatacagaggactacttccttgtacacactaacacaagtaacagatgagaagggggaaaatggcatcagtgtttatctctgatgagtacatcaaaatcttaagggtgaatgtctttatactttcagattttcttgtgcatttttcagattgaattaaaaaagggggcttttgtttgtttgagggggattgcttaaagaaaggggtttatagtacagtctcaatttctactgtttacacatggaatttatttggtctgtctgacccaatctgtttctggtaaaggtgcatgaaatgagctttgaaaaaatatctaaaacttaaaaataaaggaaaaggcagtagatcatgtcctttcaaagtcatacagggacattgcttaacatgcctatcaagaaggcttctaggcaaattgctgaagaaatgtatatatttctttatgcattgaatcctagcagattgtgtgtgtatatatagtgtgtgtgtatatatatatatacaaacacacaatgaactattattcagccttaaaaaaggagatcctgccgtttgtgacaaggaacctagaggacgttatggtaagtgaaatgagtcaaacacagaaaaatactgcatgatctcacttatgtgtggaatctaaaagtaacagaaagaaagaggaaaaaaaatcaaatacacagtaacagagagtagaatggtggttaccaggagcaggggaaatgggaagatgtaggtcaaagggtaagtctagagatctaacgcacagcatgaggactacagttaataatattgtattgtgtattggaaatctgctaagacagcttttagatgcacttagtacaaaaaaaaaaaggagggggtaaccatgtgagatgatgaatatgttaatttgcttgactatagtatcatttcactatataaaatggcatattacatacttttaatatatgtaatttttaaaagttaacatataatgagcttattttttaatgttttaacatttttgttttaatttctaataagataaatattggcagatcatttggaggcctcaatttttaagagccaaaggggatcctgagactcaagtctgagactcactgatctatatttgtttggcgttgccatttactactaagggcgcacattactcagcatactcatttcaaaatgcccttcctggtggactacataactcctatttctccaattctgctttgaaacagccttttgccatctccggtttcctcattaagaagttgaataaattttattatgtattcattgtgtatttggacaacagtcatgtataattttaaggattatattttgatagaaggtacgatctgctgatttatacaatttagtcctgagtttcttttctctgtattcaaaagctgatgaaagaacagggaacattatgaagtctcataatcattcttaaacatttccctaatgaaatgaaagaagactgcaatcatcagctatgtctaaaactattgtgttccttcacaaaagtatttaaaaggaaagaacaagtacaaagtttgtgaagcaaaatgacatagttttgaaagaagatccaagcttgagaatgggtctctaatttgagagataacatttactttaatatggaagaagagcacactttcaatctattgccaagatctttccttcccaatacaagctccaccttcctcccagggaaacaacacagtacaacaacataatttcagctctgtctgtgcagaaagctttcttagtcaggaaggtataaaaacagcaggagaaatccataattctgctactcattaggaaacacttaacactgatctcaggcttcagtatgcattagaattatctgagagacctggtagaaatacagatttaaattcactatgcagggtgggagggatagcattaggagatatacctaacataaaagatgagttaatgggtgcagcacaccagcatggcacatgtatacatatgtaatgaacctgcacgttgtgcccacgtaccctagaacttaaagtataataaaaaataaataaattcactatgcaatgtgggggcgggtggggggcggccacacagcactccaggtgactctaatcgaaaataaaaagcgagccaggtggagtggtgcatgtccatagccctagcaacttgggaggctgaggtgggaggactgcttgagcccaggagtttgagaccccacccccatcccttaaaaaataaaaaataaaaataaaaattcatactttgggaaactatactaaagtattagaattggccgcatagctgttgtgtttttctaagaatcgtccgtgtaaccttaatatctaaatgtcaagcccctctacctgatctgaaaggcccttcacaatcttgcccaggtctttaaacttcaactccactcctacatccgtctctgcccttcagtaactccctagtacagccacgctgaaccatttctgtattccttcctgatatccacccttctctctctttcctcttctctgggtgggactatttattcttcacagcggtgtgatagggtgggtaagtacatagctctctggactctaaagccagtagacctggtttccaatcccggagcaccctcactttggtaaatgtggttgacctctctgaacctgagatgcctcctctataaaatcagagataagaatacccaccccaaggctattgcatgagcactggcagcattcagtatagatgctaaacatgtttataccccccaacacacagaaaaccttcagtcttcccaggaaaaactgccctgtcctctctaaataatataaacatccctcttggagataaacacacattatacaggcctgtaaacccaattctggtaggacttataagcagatacttaggaaaatgcattagatcaaatcagtatactgaagttttaaaaataacacaggccaggtgcagtggctcacacctgtaatcccagcactttgggaggctgaggtgggtggattgcctgaggtcaggagtttgagatcagcctgactaacaaggtgaaatcccatctctactaaaaatacaataactagccaggtgtggtggcaggtgcctataatcccagctactcgtaaggctgaggcaggagaatcgcttgaacctgggaggcagaggttgtagtgagccgagattgtgccactgcactctagcctaggtgacagagcaagactccatctcaaaaaaaaaaaaaaaaaaggagaacccaaatccataaggtagcctaccctcaccatcccccaaagttattttaccagagggtttttaatgatcatattccttcatagtttgattattttgatgccaagggcagaaaaagcaaccactgatatttaggatcccacagttgccaaataaccactaagcttacctacagcaggtggcatatgcctaagtatggaaggcagattgaggtgaagttgactaatccagtccatgttaaaacattctgagcatttagtatgcacaaaaatgtttgataatgtaaaaaaaaagtgcacaaagtatggtttcttctttccgaggagctcaacccatttaggggaaagtactgacaaatgctttcttccatagacaaaaataacaatgaccaccatcctccaaaattcaccttgtttatcctcttcaggaaacagaggaagttaaaaataagtacgatttagaagacaggtgtttgtttacaaatatcaacgccataaaaaagatttaaaagtctgccaggatgtggaaattctcatcacatcctcctaacatctgtgaggggtaatattattcctattttatagatgaagaagctgaggctcaactgctatataagcgttagcacaaattcatgaagcttgcgtggtggagctagaaacaaagctcagttttaaccataaggtcatctcctttgcttagaattgaaatttaagcattcttccagatctaggttgagtttttaggtagtcttcatgttttgtaacgggcaagtctaaaccatgccattttagatgacctctcttgtcaggggctgcagacccatttggccagaatgagtatgttgtttactaattaccataaaaatttgtcagaaagttagagaactcttaaataacagcccaaatgccggggatggggtgggggtggtcggggagtaagttatggacaagcttcaagtacaggtggccaaacagtcagaagatgcagccttaaaacaagcaaaattgagggcacgattttctgttcttgtacctgcttcccaagcaccctttcttcacattttatttgattctctcaacaatcctattataggaggaaaactgtcataaaaagaaaactcttagcagttgttttagtccattttcacactgctgtaaagacatacccaagactgcgtaatttataaaaggaggtttgactcacagttccacgactggggaggcctcaggaaacttacaatcaaggctgaaggcaaagaggcacgtcttacgtggcagcaggtgagacagat

SEQ ID NO: 93473 - DNA, 13477 bp, Homo sapiens
cacagcactgggtggggtttcagccctggggccaagctcttgtgaggtctgtcatcatcttctcctgttgttttgtttttttgtttgtttgtttgtttggtttttttttttttgagacagagtctcgctctttcacccaggccggactgcagtggcgcgatctcggctcactgcaagctctgcctcccgggttctcgccattctcctgcctcagcacccccgagtagctgggactacgggcgccgccaccgcgcccggctaattttttgtattttttagtagagacggggtttcaccgtgttagccaggatggtttcgatctcctgacctcgtgatccacccaccttggccttccaaagtgctgggattacaggcgtgagccaccgcgcccggcctgtttttgttttttttttttttgagacagttttattctggttgcccaggctggagtgcagtggcgcaatcttggctcacgcaacctccgcctcccgggtacaagcgattctcctgcctcagcctccctagtagctgtgattacaggcacgcaccaccacgcccggctaattttgtatttttagtagagacggggtttctccatgttggccaggctggtctccaatgcccgatctcaggtgatctgcccacctcagcctcccaaagttctgcgattacaggcgtgagtcaccatgcctggccagtctcctgtttttttaaaaacttattatttagccggtgtggtgtctcacacctgtaatcctggcactttgggaggccgaggtgagcggatcacttgaggtcaggtgttccagaccagcctgggcaacatggcaaaaccttgtctctactaaaaagacaaaaattagctggaggtgctctcttgaacccaggaggcagaggttgcagtgaactgagatcatgccactgcactccaacccaggaggaggaggttgcactgagccaatatcatgccactacattccagcctgggcgacagagcaagactctgtcccccccaaaaaaaaaacagaaaaaaaaaaaaagaaagaaatctgaagcaattatgaccaaatgttaacatctgtttcttcacgtggtgggtacaggcgtgttttggaagcttctatgcttcctgtattttgagatcacacaaaattatgtttattatcttattgtgctacatgatctttgtagaaaagttggtaaattctggaatgcacgaagaaaaagattataatagccagtaatacccctgcccagagagacagtatccattaatttttctctgcctatgtttgtcttcggaaaaatgggatactattggcactattttataactttttaatttgtattaacactttctatattttttaaattgaaaaagctggccaagcatggtggctcaggcctgtaaacccagccaatgtgggaggatcgcttgagcccgggagttcaggaacagcctgggcatcgtggcgagaccacattgctacaaaaaaaaaaaaaaaaaaaaaaaaaattagccaggcatggtggtgcacacctgtggttccatctactcaggaagctgaggtggaggatcgcttgagcctgggagtttgaggctgcaataagctacgaatgcaccactgaccttcagcctgggcaacacagctagactcttgtctcagagagagagagagagagagagagcacaatgaaaaaaataaacctgatcttgcacagagcatgtaataaaacctgtgcgttcttggctatctctctctggtctcctccagggtgctgaataagctcttctctctccattcacccaggagaactctcttctgctgattttctgtggagctagatcaggctgtgactcagaatctccctccacctccaccctttcctattttcccaacaccagtgtcaatctcagatgtcaacaaccccacgagtgagttcctcctgttgccaatacatccaggtcctgttctccgctgctgtctctacccaatcccttcccttccttcctcctgccaatcctgctttccctgtttcttgctcctctgacctcctccgcattgcttgactgtctcagatacactctggcctcagggtcttggcactttctgttctccctgcctggaagggtcttccttagtcagatactgaggtcacccattgtgttcaagttcctttaatttatctgaaatgagtctgggcgtggtggctcacgcctgtaatcccagcactttgggaagccaagccgggtggatcacttgaggccaggagttcgagaccagcctggccaacatggtgaaaccccatctctactaaaaatacagaaattagctgggcgtggtggcacaaacctgtggtcccagctactcaggaggtcgaggcaggagaattgcttgaacctgggaggcggaggttgcagtgagccaagatcgtgccactgtactctagcctgggtgacagagtgagactctgtctcaaaaaaaaaaaaaaaaaaagaaaaagataatttatctgaaattatctgaaatgcaccaccctgcccccatcattgactctcctgttgctgtagttttctctgcagcacttaccagtgcttgagaaaaccacccactcatttatcttgctttcagtttctcttgctttcagtctgtcttcagttaatgaaagctttttttttctttcttttttctttttctaaaacagagtcacccaggctggagaccagtgatgcgatcacggctcactgcagactcgaccttctgggctcaggggatcctcccacaccccttggcctcctggggattgagactacaggcacacaccaccacacccagctaatttttgtattttttgtagagagagggatttgtcaccttgtccaggctgctcttgaactcctgagttcaagcaatcctcccaactcagcccctcaaagtgctgggattacaggtgtgaaccactgcccctggcctgtttatttaaaaaattaacattcattctcagtttattggctaagtttagaagtagtatcagaatgtttaagagaacttactgttctccttttatttgtatgtttgcattgtagatttttaataactgataaggacttctcaaggtgtttgcttggtggagacatttaaaaagattaaagaataggccaggtgcagtggctcatgcctgtaatcccagcactttgggaggccgaggcgggtggatcaagaggtcaggagatcgagaccatcctggctaacatggtgaaaccccatctctactataaatacaaaaaattacctgggtgtggtggcacgtgcctgtagtcccagctactcaggaggctgaggcaggagaatcgcttgaacccgggaggcagaggttgcagtgagctgagatcgcaccattgcactctagcctgggtggtagagcaagactctgtctcaaaaaataataataataaattaaaagattaaagaataagctggcacagtggctcacacctgtcatcccaacactttttgtagagacctcatctcttaaaaataaaattagctgggcgtggttgtgtgcacctgtagcccagctactcaggaggctgaggtgggagcattgctcaggaggtcgaggctgcagtgagccatgattgcaccactgcactccagtctgggtgacagagctgatacactgtctctaaaaaataataataattgaccgggcgcagtggctcacgcctgtaatcccatcactttgggaggccgaggcgggcggatcacgaggtcaggagatcgagagcaacatggctaacacggtgaaaccccgtctctactaaaaatacaaaaaaattagctgggcgtggtggtgggcgcctgtagtcccagctactcgggaggctgaggcaggagaatggcatgaacctgggaggtggagcttgcagtgagccaagatcgcgccactgcactccatccggcttgggtgacagagcgagactccatctcaaaaaaaaaattaataataataattattattatagtagtaaaagagtatagaataaaatgcatcacacttataaaatgtaaaatgttaatttcaatccactaaacttataaacggacccaaatatgcatccaatgacctcttaaagtgatatttctttttctttttgttgagatggagtctcactcactctgtcacccaagctggagcgcagtggtgtgatcttcagctcgtcccaacctccgtctcccaggttcaagcgattctcctgacctcaagtgatccgtctgccttggcatcccaaagtgctgggattacaggcctgaggccaggccctgaattaattttttgatgtttcactttgccaggtgtataagtaacatgttagttgtgattgtaactaaataaaggcttaagggaaaccgtgtttctaaatttctaaattgactacacatttacaaaggaacccacaaagatggatttttgggccgggcgcagtggctcacgcctgtaatcccagcactttgggaggctgaggcagacagattgcctgagttcaggagttcaagatcagcctaggcaacaaggtgaaaccctttctctactaaaatacaaaaaaattagctgggcatggcagcgagcacctgtaatcccagctacttgggaggctgaggccggagaattgcttgaaccagggaggcagaggttgcagtgagtcgagatcacaccaccgcactccagcctgggcaacacagtgagactcgatcttaaaaaaaaaaaaaaaagatggactttttcggggccccaaggcttcaaaattcaaaatgctgtcatgagttagtttgatttgaggaaccaaaaattggcttttgtggctggagcagagtgagcaagggggaagtgaatccggaaggttgagtctgcaaggtcaagggcaaggaacagagaagggtgtgggtggggcaggttgcgtgtgctcttgggggctgcagggaagggggcttttatctgggtaaggtgggagccacagagggttctgatcagagggacagatctgacttagattttgcatgatgtcccccagctgtgggctgcggggcatgggctgctgaataggtggtttaggtgggcaaagatgggtcatggtgccccctaccctttaaaaattaaaagacagggccaggagcagtggctcacgcctgtaatcccagcactttgggaggctgaggtgggcggatcacctgaggtcaggtgtttgagaccagcctgaccaacaaggtgaaaccccatctctactaaaaatacaaaaaaaattagctgggcgtggtggcagccacctgtaatcccagctactcgggaggctgaggcaggagaatcgcttgaacccgggaagcagaggttgcagtgagccaagatcgtgccactgcactccagcctgggcgacaagagcaagactgtctcaaataataataataggccgggtgtggtggctcacacctgtaatcccagcactttgggaggttgaggtgggtggatcactggagcccaggagtttgagacaagcctgggtgacacagtgagaccccatctaaattattattattattattatttgagacagagtcttgctccatcacccaggctggagtgcagtggcgcgatcttggctcactgcaagctccgcctcccgggttcacgccattctcctgcctcagcctcccaagtagctgggactacaggtgcccgccaccacgcccagctaattttttgtattttttagtagagacggggtttcaccatgttagtaaggatggtctggatctcctgaccttgtgatccgcctgccttggcctcccaaggtgctgggattacaggcgtgagccaccatgcccagcctgaattttttttcttaaagattaaaaaggcagagcctctctgctcctcccatttgacagacagccacatcttttcatgcagtgaaaaaggcatgtccccgagacaccgtggtgaaagtgaagacaggagtaaatggatttggccatattgggtgcctggtcaccagggcaccagagctgcttttaactctggcagaatggatgttgtcacctcaatgaccccttcattgacctcaactacatggtctacatgttccaatatgattctacccacggcaagttccgcggcaccatcaaagctgagaagtgggctgggtgtggtggctcatgcttgtaatctcagctacttaggaggttgaggtgggaggatcacttgagaccaggagttcaggaccagcctaggcaacatagggagatcctctctctcttaaaaaaaaaaaaaaaraaaagaaaagactgagaaagagaagggaagcttgtcatcaataggaaatgggaatctcatccccatcttctagaagccagatcccagcaaaatcaaattgggtgacgatgctggcactggttatgtcatggagtccaccagcagcatcttcacgaccatggggaaggctggggctcgcttaggatgggcagccaaagggatcaccatctctgccccctctgcccatgcccccatgtttgtgatggacatgaaccatgagagatacaaaaacctcatgatcgtcagcaatgcctcctgcaccaccaactgcttaccctccggccaaggtcatccgtgacaacgtttttttttggtttggtttggttttctttctttcttttttctttttttgttttaaatagggatggaggccaggtgcagtgactcatgcctgtaatcccaacactttgggaagctgcggttggaggatcacttgagcctaggagttcaagaccagcctggccaacatagcaagactctgtctctacaaaaagtttaaaaaaattatccaggcatggtggggtgtatctgtagtcccagctatttgagaggctgaggtgggagggttgcttgagcttgggaggttgaggctgcagtgagccgggtgacggagtaagaccctatttcataaataaataaatagagacgggggtctcactttgttgcccaggctggtcttaaactcctgggctcaagtgatcctcccactttggcttcccaaaatgctgagattacaggctgagccactgaccctggtcatccatgacatctttggcaacatggaggggctcatgaccacagcccctctgggaaactggcgtgacaaacatcatccctgcatctactggcacggccaaggctgtgggcaaattcctgcactgaacaggaagctcactggcacagccttccgagtccctgccaccaatgtgttggtggttgacccgacctgccatctggagaaacctgccaaatatsatgacctcaagaaggtggtgaaacaggcattgggggggccccctcaagggcatcccgggctacattgagaacaaggttatatcctccgcctttgtttttaaattatatttatttatttttttgatagggagtctcgttctgtctcccaggctggagtgcagtggcgcgatcttggctcactgcaacctccacctcctgggttcaagcaatcaattctcctgcctcagtctcccgagtagctgggattacaggcgcacaccgccacacccagctaattttttgtatttttagtagggatggggtttcaccatgttggccaggctggtctcaaaatcctgaactcaagtgatccacccgcctcagcctccgaaagtgctgggattacaggcctgagccaccgtgcctggccgtctcctctgacttttaacagcgacacccatccttccaccttctgtgctggggctagcattgcccttgatgacactttgtcaagttcatttcctggcatgacaatgtatttggcttcagcaaaaaggtggtggtccacactgtctccaaggagtaagaccctcagaccaggagccccagtgacagtatgagaggaagagagaggccctcagctgcttgggagtccctgctgcactcagccccccaccacactgaaaatctccccatacacagtttccatgccagaccccctgaagaacagggcctatcaataaagcagtaaggtcctctgtacttagaccaaaaacaaaaaaaaacaaaaaaaaaacaaaaaatgaaaattactcttgcctgtaatcccagcatttagggaggctcaggtgggaagattgcttgagcctaggagtttgagaccaacctgggcaatatggtgagactttgtctccaatatagatagatgatagacggatggatagaagatagacagattagacagagagagagagagaaaggagagagagagagagagagaaaagaggggaggggaggggaggggaggggaggggaggggaggggaggagaggagaggagaggagaggagaggagaggagaggagaggagaggagaggagaggagagagaaattaggcagaggagaggagagagaaattaggcagatgccttgggcagtgaagtccctggggatggtctactgttcccgcagcctgagcgcctttttcagacgtttttatctgtccactgctgcccctgcatggccacagcctgaactgcagcaccgaacgcagacccagtttcccttttggagaagaaattaatgctccttccagccccccacttgccactaggcctgtgcagggcgtggacagattctacagtggatccagccagagactgccccagagaaaattccaggggtgggatgagtgaggtatgctgggactggaatgtttgtaggataacatgatgagcagccggattcccaggaaattgcaaaccgtgtctgctctggtgagattctcagaggaggggatctataggcagttctgagtaggcactgggtaaaagcctggaaagaggaccctggcttggatggggctctgcctcactcgccatgagctccttggcgctatcagtcagcacagttcagctgcatgggtgtgaaggtgtcctggtgactggctacccccatgcctgcctcagtgcacgggaggtggaattatggatttggtggggctcgcacaggctaagggactgattttcagtctggagaatgggagggcaggatgagctgtggagggtcaggctggtggtttggagggtggcatgatgtaaatgtagctgttcactgttgtagtttgctgccaccagttcagtctggctaggttccaggtgggtcaataatctcaaatggggctgggctcagtggctcacacctgtaatcccagcacttcgggaggccgaggcgggtggatcacttgaggccaggagttcgagactagcctgcctaacatggtgaaacctcgtctataccaaaatataaaaaattagccaggtgtggtggcgggcgcctgtaagcccagctactcgggagactgaggcaggagaatgcttgaacccagggggtggaggttgcagtgagccaagatcgtgccactgcactccagcctgggcgacagagcgagattccaccaaaacaaacaaacaaacaaaatcccaaatcgggagaggtgaggtggggtctgtcatgccaaggagttggtttctttcttttttttttttttttttgagatggagtctcagtctgtcacccaggctggagtgcagtggcgctatctcggctcactgcaagctccgcctcccgggttcacgccattctcctgcctcagcctcccaagtagctgggactacaggtgcccgccaccacgcccggctaattttttgtatttttagtagagacgggatttcaccgtgttagccaggttgctctcgatctcctgacctcttgatccgcccgcctcggcctcccaaagtgctgggattacaggcgtgagccaccgcgcccggccaggagttggtctttatattacctaactcccacctctttcctcaatgatttgaacgtttgatcatttgaatgtttgaatgtttgatcctcgtgatcaaacattcccgttactctctagaccccatcatgctcccccaacccctccccacatcctctcagatatccaccagctctagcccccagagtaaaaacatccatcgtctccaccatcaagtgaaagcaaatggtgacttccttgcctcagccattgctgagccagttggatggcaaggaggaaaaccccacccaagccccacctaacccctgtcctccttttcatcccagccggtgcccactgattccatggttacctgacttatccactccagctcctggtccttctatcctgggtaccgctgaactgcttgggagtagcaggctgagaagttctggtgcccctcctgcagcaaggctgtcagcgggcacgggaggatgcggggaccggctggagtaagccatagccagggcaggaaggagccccacacagatctccctcagctgtgaactccacaacgacccacctcacagtcaacaacaccaatggacactcgttcctctaatcccgttattactaggcacccatttctctccacccaaggttttgttcaccatcctcaattatttattatttttttgagatggagtccaggctgaagtgcagtaacgcaatttcggctcactgtagcctctgcctcccgggttcaagcgattcccctgtctcagtctcccaagtagctgggattacaggcccccggcaccacgcccagctactttttgtatttttagtagagacggggtttccccatgtttgccaggctggtctcaaactcttgacttcaggtcatctgcctgcttcggcctcccaaagtgctgggattacagacgtgagccaccgcgcccagccggtacccccaattatttcagtattcatgatccgcaggaaggaatacatatgttttgttgttgttgttgttgttttgttttgtttcttttgtatttttagtagagatgggattttgccatgttggccaggctggtctcaaactcctgacctcaggtgatcctcctgcctcggcctcccaaagtgctgggattacagttgtaagccaccatgccaggccatgaatacatatgttttattgagttctttttttttttttttttttttttttgagatagggtctcactctgttgcccaggctagactgcagtggcaccatctgctcactgtgacctcgacctctcaagctcaagcgatcctcctacctcagcctccccagtagctgggactataggcgtgcaccaccatacctagctaatttttgtattttttgtagagacagggtttggccatgttgcccaggcttcttctttttcaatgaatgtatttacagctataaatttttccttctagcactgctttctctgcattccatacattttgatatgttggattttcatatttgtctcaaggttgtttttattttttattttatttatttttatttttatttttttgagacaatttccctcttgttgcccagtctggaatgtaatggcatagtcttcgctcactgcaacctccgcctcctgggttcaagcgattctcctgcctcagcctcccgagtagctgggattacaggtgcccgccaccacaccgggctaatttttgtatcttttgtagagatggggtttcaccatgttggccacgctggtctcaaactcctgacctcaggtatcagcctcccaaagtgctgggattacaggcatgagccaatgtgccccgcctcaatagcctcaagcaatcttgtcacttcaatcccctaaactgggactacagggaggcaccactgtgtctggcttggatcatattttaaacatctattctgcctatctctgttttttgattggaaagtttaacccatttcaatttaaaggaattcctgaggtggaaggcccaacttcagccattttaccatttgtgttctgtgtgtcttggagcttttttgttctttatttcttccattactgccttcttttctgtttacttgactttttgtaatgagactttttgattctcttatttcctttcgtgtattttctatagatattttctttatggttactatggggattacatttgacattctaagttataataatataactttattttattttattttgagacagagccttatctgtcacccaggctggagtgcagtggtgtgatcatggctcactgcagcatcaacctcctgggctcaagcaatcctctcacctcagcctcccgagtatgtgggactataggtaagggccaccatccctggctaatttttaaaaaaaatttttgtacagacaaggtcttactatgttgcctgagctcttgaactgctgagctcgagtgatcctctcgcctcagcctcccaaagtgctgggattacagacatgggccactgttcccagcaaaggtttaaatgatacctatttaacttcaatagcatagaaatattctattctattaattgagaactagtcttgctatgttgcccaagcttagatttgaactcctgggctcaagtaatcctcctgtttcagcctcccaagtagctgagactacatgcatgtgccattatgcctggttatggtataaacatactctatttccttttttcttttctttttttttttttttttttttgagacggagtttcgctcttgttgctcaggctggagtgcagtggtgtgatctcggctcaccgcaacctctgcctcctgggttcaagcgattctcctgcctcagcctcctgagtagctgggattacaggtgtgcgccattacgcctggctaattttgtatttttagtagagacagggtttctccatgttggtcaggctggtctcaaactcccgacctcaggcaatccgcctacctcggcctcccaaagtgctggaattacaggcgtgagccaccacgcctggcccagatactctatttttatagtttcctcttcttttatgttattttttaaaatttttatttacttatttatttgaggtaggatctcactctgtgacctaatctggagtgcagtggcgtgatcacggcttactgtagcctggaccttccgggctcaaacaatccttccacctcagcctcccaagtagttaggaccataggtgcccaccaccatgactggctaatttgttaatttttccatagagataaggtctcactatgttgcccaggctggtcttgaactcctgagctcaagcgatcctcttgcctggactcccaaagtgctaggattactggcgtgagccaccgcccccggctcttttatgttgttaatgtcacaaatcacatctttatatattgagtgcccaatatcatagaaatataattatttttattacttttcttgagaaagcatctcgctcttgttgcccaggctggagtgcagtggcgtgatctcagctcactgcaacctccacctcccgagttcgagcgattctcctgcctcagcctcccaagtagctgggattacaggcatgtaccacca

SEQ ID NO: 93474 - DNA, 27033 bp, Homo sapiens
ttgcaaggacaaaaaaccaaacactgcgtgttctcagtcataggtgggaattgaacaatgagaacacacggacacaggaataggaacatcacacaccggggcctgttgtggggtgagggaagggggagggatagcattaggagatatacctaatgttaaatgacgagttgctgggtgcagcacaccaacatggcacatgtatgcatatgtaactaacctgcacgttgtgcacatgtaccctaaaacttgaagtataataaaaaaaaagagagaaaaagcatttgacaaaatccaacacctatcattgataaaaaccctcagtaaacaaggaataatagaagcgaacttcctcaacttgataaagaacatatacaaaaaccctacagcaatgtcacacaataatgagaaactacaagatttgctgccaaattaggaagaaggcaagtatatcccctcttaccactgtttttttcttagcatagtattctaaatcatagctaatgtattaagaaaataaaataaaaggtgtagttactggaaagaaagaaataaaactgcatttgcttttacataccatgattatctaagtagaaattttttaaaaaatcaattaaaaaatcccttctgaaactagtaagtgactatagcatagtggcagaatataaggttaatgtacaaaagtcgatagttttttctgtatactggcaatgaacaagtgaaatttaaaattaaaaacaatgccggttatattagcaaccccaaaatgatatacttagatttaaatctaacaaaacatggacgagatctataagaggaaaactataaaactcagtttaaaaaaaatcaaagaactaaatagagagataatccatgtttatggataggaagactcaatattgttaggatgtcagttctaccaaatttgattcaagattttatgcaatcccaataaaaatcgtagggagttactttgtggatattgataaactgattccaaagtttatatggacagacaaagactcagaataaccaacagagtactaaaggagaacaaaggtgaagaattgacactaccagatgtgaagacttactatgaagctacagtaatcaaaacagtgtagtactgatgaagaatagacaaacaagtcaatgcaagagactagagagccagaaatagatctatagtaatatagtcaactgatcttagacaaaggagcaaacacaatatcatgaaggaaaattgtcatctcagcaaatggtgctagaaaaactacatccacatgccaaaataaattgataaatgtagacacagatcttaaaactctagtaaaaataaatcaaaatggatcataaatggtaatgaaaatgaaaaactcgaactcctagaagataacaggagaaattctaggtgacctatagtatggcaattattttttagatacagtcaagggaacagttcatgaaagaataataatatgaaattcattaaatttgtaacgtttgttctagaaaagacactgtcaagaaagtgagaaggcaagtcattgagtgggagaaaatagttgcaaaagacacatctgataaaggactgttgtccgaaatatacaaagaactctttaaactgacaaaaagcaaatgaacaacctgattaaaaaatgggcaaagacctaacagacacctcactaggtagctaataaacatatgagaagatgctcaacattttatgttattaaggaactacaaactaaaacaacagtgacatacactacacacctattggaatggccaaaatctgacacactaacagcaccaaatcctcaaaaggttatgaagcaccaggaactctaccatcactttggaaaaaagcagtttctcacaaagctaagcatgttcttaccatgcgatacagcaattgtgcttcttggtatttttccaaatgagttgtaaactctgtcctcaccaaaacctgcaaacagattgtttagagcagctttattcataaccacccaaacttggaagcaataaaaatgtcttccaggagttgaaaggataaactttgttacatctagacaatggaatattgttctatgccaaaaagaaatgaactatcaagccatgaaaagaaacggaggaaacgtaaatgcacaatactaggtgacagaagccgatctgcaaatgtcacatgtgatttcacttatatgacatgatgaaaaaggcaaaactatgaagacagtaaaatcttcaggggattccagaggttgggggaagggagagataaaaggtgctcaaatagaggatttttaaggcagtgaaactactctgtaatgatactacaatggtggatacctatcattatacattggtccaaacctgtacaatgtaaaataccaagagtgaaacctaatgtaaactatggactttggttgatactgatgcatcagtgttggttcattggttataaaaaatggagaatggcagagcaagacggccaaatagaaggctgtaccaatcgttccacctacatggtcaacaatttaacaattatctgtgcaaaaacacactttcataagaaccaaaaatcaggtgagcattcacagtacctgattttaacttcataccactgaaagaggtattgaagagggtaggaaagacagtgttgaatcactgatgccaccttttccccatcactcagcaggagccatgtgacatgaagagagaatctgtgcatttgtgggagggggagagcatagtgattctgagatattgcattgaactcaattctgccttgtcacagcagaagacaaaactgggctgaactttagtaayaccagcccacggagggagtatttaaaccagccctagccagaggagaatcaccatcccaacagtcagaacttgagttactgcaagcctcagcaaagcgggctaaaatgctatggggcgttaaataatgtttatttaagtttaataaacttaaataacaatttaagttccaattaagtaacaattttaagtttaataaataacaatttaagttaataataaacattatttaaggttccaaagcctaggctctaaacagtctaggccacagggattacaactcctaggcatgtcctagtcctgaactggactcagagccagtggacctggagaacaggcaacctattgagacaccagccaggccagctaagggagtgcttgcaccgtccctcctccaaccccaggctgcacagcttacagttcccaaggagacccctttcttctgcttgaggagagggaagagtggggaggactttgtcttccatcttggataccagctcagtcacagtaggataggcaccagtcacagtcagagtcataaggcccccttgccatgccccagctcctgaacatcatttctggacaccccctgagccagaagggaacctgctgccatgaaggtaaggacccagtcttagaaagacccttcacctgctgactgaagaggcttatggtaatagtggctgtgaggtgaggctcctctgcctgtggaaacgggagggaagggttggagggactgtgtcttatgatttgagtgccagttcaattgcaatacaatagaataccaggtagacttctaaggtttctgactccagtccctggctcctggatggcacctctgtacccaaccagggcctggaggaacttgcttccctgaagagaaggatgcaagcctggctggcttcactatccacagattgcagacccagggccttgagtgaacttagggggtagccagttagtggttacagcagaccttggacaaggcccagtgctttgatggcttaaggactgacccagcatagttccagtggtggtagccacaggggtacttgtgtcactgcacccccagatccagagagagagagagactccatttgtttgggagaaagtaaggaaagagaagaagagtctctgcatggtaatccagataattcttccggatctcatctaagaccattaaggtgctacatctaggagatgcctatctctcgtcatatacaaaaataaataaaaatggattagacttaaatctaagacctcaaactatgaaactactacacaaaaacatcagaggaagtctcctggatatttgcctgggcaaaaattcttcttgtgtaataatttacacgcatagacaacaaaagcaaaagtgggcaaatgggatcacattaagttaaaaagcttcttcacagcaaaggaaatagtccacaaagtgaaagacaacctacagatgggagaaaatattttgccaactatctatctgacaagagattaataaccagaatatataaggatctcaaacaactctataggaaaaaaaaatctaacaatctaattaaaaatgagcaaaagatctgaatagacgtttctcaaaagaagacatacaaatggcaaacaagcatatgaaaaggtgttcatcactgatcatcagagaaatgcaaatcaaaactacaataagatataatctcaggccagttaaaatgacttatataccaccacacctggctaatttttgtggttttaatagaaacagcgtttaggctgaggcacgggaatcgcttgagcttgagaggtggaggttgtagtgagctgacatcataccatgcactccagcaggggcaacacagtgagactctgtctcaaaaaaaaaaaaaaaaaaaaggcttatatgcaaaagatcagcaataagatgccggcaagggtgtagagaaaagggaacacccaacactgttggtgggaatgtaaattaatctgaccactatggagaacagtttggaagttcctcagaaaactgaaaatagagccaccatagcatctagcaatcccactgctaggtatatacctgaaagaaaggaaatcagtgcatagaaaatatatgtgtactctcatgtttgtctcagcactagtcacaatagccaagatattgaagcaatgtaagtgtccataaagaaatgaatagacaaagaaaatgaggtacttatacacaatggagtactattcagccataaaaaagaatgagatcctatcatttgcaacaacatgaatagaactggaggtcattatgttaagtgaaataagccaggcacagaatgacaaattgtgtatgttcttacttatttgtgggagctaaaaattcaaataattggactcatggagatagaaagtaaaggatagtgaaagaagctgggaaggatagtgggggagtgtgggggaggtggggatggttaatgggtacaaaaactagaaagaatgaataagacctagtattcactagcacaacagagtgactgtagtcaataataatttgtgtacatttttaaataactaaatgagtgtagttggattatatataaaagataaatgtttgaggtgatggatatcccatttaccctcatgtgattattatgcattgcatgcctgtatcgaaatgtctcatagcaatctataaatacatacacacactattgtacccacaaaaattaaaaataaatattttttaaaaaattaaaaaataagatagaacaaattgagcactctcgtgtgggattttggtagtggaagaggttgtgcttattttggaccaagagaaaacaggacatgtttgtaccctccactcaatttcgctgtgaccctaacactgctctaaaaataaagtctgtgtttttaaaagcatgtgatacagagtttcacacactgaatttgtctagtgaattattatctagatccaaaatagttgtattttctactatataacacattacatcatctgtctagctatctctctcacaaagtagaatgtctgtgaaayagaacacaaggaaggagagagaattatgacccaagcaagaatcatgggtccagaattccacccaaggaagctagttcaaagccagagaaagagcacagcttttcacacaattgaatagatctcaacttcatgattttggtattgaagatgctgacagtagccagtggctctgtgaaggcaattttccaacctaccattcttggctactcctgggatattttacttggctgtgagatccccctgagaagcttctctttttctcacacaattcctccatcagcgaagtgtggtgggcagcacacagtgactatgattcctggagatggcactgggactgaacttatgctgcctgtcaagattatgttcagacatstgtgtgtgcctgtggactttgagggaatgtcagtgacctccacctytgcctcacatgaagaggaaattcataatgccatcatggcagttcattgaaaccgtgtggctttgaagagtagcgttaaaactgacgacaccctgccaccatcatacaaatccttcaacaacatgttgcataccaccctagatctctatgccagtgtcattcatttaaaaaatttgccaaacgtggagaccyggcacaaagatgtagacatcctagttgtttgggaaaacacagagggtgagtatagcaatctggagcatgagagtgtgaaaggagtgacagagagcctaaagatcatgactaaggccaagtctttgygcattgctgaatatgccttccagctggcccagaagatgggatgcaaaaaagtgatggctgtgcacaaggtcaacatcacgaaactgggagatggtctcttcctccagtgctgtgggggaggtggcatcccgctatcctcagctcaccttagaagacatgattgtggagaatgccacaatgcagtgmgtatcccagccccaacagtttgatgtcatggtaatgctcagtctttatggcaatgttatcaacagtgtctgcacaggtttgattggtggggcaggccttgtgcctggagccaactatgtctatatgtatgcagtgtttgagacagcttcaaggcaatgtgacaatttagtcaatacaaatctggcaaaccctaccgccatgctgctggcaatttgtatcatgctggattacctcaaactccactcctatgccacccacattaatactgcagtcttggcatccttggacaacaaaagtgtccacactgcagaccttggaggccagggtaccacattggacatcattcaaaacatcatagaccacatttgaaatgtcaattaattgttctgtgccttggaggctaagctatccctcaaagtctgtcctgtcctacttgttacctccactctttctgctttaaaaaccctagccagcttagctactgcagactccacaagaaaccagcttatcctttaattcacaagcagggcagggtgggggcctgygtgaaccaaaactgatttttttcccattaaattgaaatgccataaaaattttttgtttaaattgaggacaattttatctaaatgaattgaggacattcttatctattttartccacaattctcccttctctacgatattatatactgaataaatcagagctgtttgtggagtcctggggctttcccagagcttggcacactgattttctctttatcttggtcattaacattcagcaaaccagcctgcagagaagcctggcttctctctagmggtcgttaatgagttaattagtgcaataaactttgcctaaaaaatatacattgtaacttttctaataaataggacaacatacagcagagctgacatagaatgcttccactccttcctagatagcccatctttcctatggtcttatttatgacctttacgttaggaattttctccagtgttctgtttcacacatgaacatttttaggcactgcagctcttctggaaaggggattcttgaattcttccagctggactcaagagtgtagaggtcaaaaccccagttaacaggcactagacccacaacattttgcgaaacagagaactatcgattgtaaactctttggtcagtgtttcacagtcttttacggtttactttcaatctttcaaagaaagaatgtgtgtataaaacaaaacaaaagaaaacaaaaagcactgagctaaatgtttactgtcactttatcctattttatttgtagtattttttaaagttatagttgggagacaaactaaaataactttattggtgcttggaaattgttacttaattaggaaattaaaaacacaatgactgtaaaaacttacagtagttttatcagtaggaaaggcctgtagatagaaatgagacagagaaaaataatgaattctacattgtggaaatgtgtgtctcgcctattacctttggatctctgcctggttaataggtcacaagttaaagacacttagaccatagaaagtttcttacagtttccaccaggctctgccttaatcatattaccttggtctaacctttcctaattgggcataaagtcagggccaggatttggacaactgaaagctagtttgagaggatttagtctgaaaagaaagtgactacctgaaaccctatctagaagtctttcttgaagaataaggcaaacaggaaagagtctatgtataaaatgaccctgatagtcactttactggccattagacatgtcactgtccagggctgccactagcccaaayggtgcccacctctgggctgatctagacgtgcaccaaaggcatgttcttttcaagtggagcaaggggcggattttagccagatggccccctgcacctccaatgccacgctaactgatcttactttaacccatactatccactcrtaccactcttttttatgatgacaaggatttatttatggcacaatcagcttaacaaaagacagtggcccagttgttggcttctatttagcaatgggggtttatgatacacttcagttaaaatktctctatctgttaaagatggtcattttcagaatcccattgcaattcttggaccagactgctgcagtgacacctagtacaccatagtaaaatttttcatttccactgttagatgctctcacttagatatgaacatctctagggtaagctccacgtgttttctttccttgtcctttgtagtctgtaacataatggctggtacataatgcatggaatacatgtttgttgaatcaaccaaaatatgagtgttatggttgataccgctacacttttttatctgtaaagtgtgataactgtacctgccttatagggttgttggaaagacggagaaaattcacgtaaaacctgtgttgttgtgcctataagtgcttagtgtattttagaaattattatattccttattacacagaatataccattctaaaagataattctgaatagaactgagtgaattttattaattcattatagatttttggtttgcggccaacttttaaatagaaaagcaaatcatatctgctgattcatcaagtctccttattctagctcctttttatttcttgaatctggcaacccctcttttttttcaccaacaccttcttcctcattagcttttcttatcattggtaacttcctaatttctcttactgcaagtatagcttcctaactgatgtcttgcctgtagtttagccctgttgaatctattttcacaatgcatccagcatgatctttctgacaggcaaagagatcatgtccctttcttacttaaaacctttattcaaaggcttcattttttctgtaaaagaaaggcagtggagcatagcatgaaaaccatctaatgttctggcctcattttcccttcctcaggttcaccatgtctgtccccccaccctcattccaatatcaatgcaatgtggcattccaacaagactataacagaatttattgttaaaggaccatctattctctctagatcaggcctttgtatacagtcttggttcctttcttcttcattagatgaatttctcctcatgcttcaggactcaacttaatcatcaccttttttggggagtcttatctttttacccctcttcccattttttgctgagattgagggggtaactctcagtgtcccctgccacagctctctatatacactatctagtatttatttctctgattgtgattacatgttttatccccaccatccctcgttaactttactgtacaatgcatcccttggcaataggagtgaagtcattcatcactatagcatcagaacctaggatagggacaggctcttagttcatactcactctaaagaaaagaagagaatagaaggaaggaagaaaagaaataagggaaggaaagaaggaaggaaagaaagaaaaaataagggaaggaaggaaagaagggaaggaaggaaagaaggaaataaggaagggagaaggagaaaagagggaaggaaagaggaaggaaggaagggaaggaatgaaaggaaggaaggaagggaaggaaagaaaggaaggaagggcttactcctaatggcttaggagtagggaactggaagagctaatctattgcaaaatgctcttgtctgacttcagtctatgaaactatcttacaaaattactcctctctaaagaagactaaagccctcaagtcagtaaaacagttggttggcaggctgcctctctttcctgagaaaatgtctgtactgcatttgttggataatttcatyttagcctttatcagtttactgtgctttgtttacaattctggtgttataaaaaatggcatcaacaagttgtctgatttttctctaaattactccttctctttacagatttgttttggttactggtcttacaaattactcagtcattcagatttaatagctgactgacattcatcccaactctgccacacaggagcagtgtgacattggataagttgcttaacctctctgatttctagttgcttatctgtgcaataaaggtaaatgtgtaccttcatgggattgttgtcaaaattaagtaagattgttttggttgtctattgctgtaaaacaaactatccaaacattagtgagttcgaatgaccagcaattatttgtcatgattatgtagattagtcggggggttcttcttatcagcagtaggatggctaagagctccagaatcacctcattcacatggctggcagttgctactaatgattgtcagtcagggggcctccatttttctccacctggttgtcgtatgtggtatgtggtattttgatctcctcacagcaatggcacctgggttctaagaaggagtgttctaagaagcgaagaccaaggctgtagacctcttaaggctcagacatgaaagttgcttaatgccctttctactatattctgttgatcaaattaggcaataatagggtagaccagatttaagaatgggggaacaaattctgactcttgatgagagaatgacarggtcacattacaaaggggcacataggtgaggagcactattgatgtgaccatttttggaaacatgctctaccaccatgaaaatgtatttaaaactcttgggcaagatggcccaataaaaacagctccagtgtgtggctcccagcaagatcaatgcagaaggcgggtgatttctgcatttccaactaaaatacctggctcatctcattgggactgattagacagtgggtgcagcccacggagggtgagccaaagcagggtggggcggttcctcacctgggaagtgcaaggggtcagggaactccctcccctagccaagggaagccatgagggactgtgccgtgaggaacagtgcattctgacccagatactatgcttttcccatggtcttcgcaacttgcagaccaggagattcccttgggtgcctgtatcaccaggccctgggtttcaagcacaaaactgggtggcagtttgcgcagacagggagctaactgaaggagttttttttcatactccagtggcacctggaatgccagcaagacagaaccattcactctcctggaaaaggctgaagccagggagccaggtggtctagctcattggattccacccctacggagcccaagaagctaagatccactgccagcacagcagtctgaagtcaacctggaatgcttgagcttggtggagggaggggcatccgccattactgaggcttgagtaggcaattttcccctcacagtgtaaacaaagctgccaggaagttcaaactgggtggagcctaccacagctccgaaaagccacttagccagactgcctctctagattcctcctctctgggagtagcatctctaaaagaaaggaagcagccccagtcaggggtttatagataaaattcccatctccctcggacatagcacctgggggaaggggcatctgtgggtgcagcttaagcagatttaaatattcccggctggacgcggtggctcacgcctgtaatcccagcactttgggaggccgaggtgggcggatcacgaggtcaggagatcgagaccatcctgtctaacacggtgaaaccccgtctctactaaaaatacaaaaaattagctgggcgtggtggtgggtgcctgtagtcccagctacttgggaggctgaggcaggagaatggcgtgaacccgggaggtggagcttgcagtgagccaagattgcgccaccgcactccagcctgggtgacagagcaagacgccatctcaaaaaataaataaataaataaaataaatagataaataaataaataaataaataaataaataaataaatatttcttcctgctggctctgaagagagcagtggttctcccagcacagttctcaacctctgctaagggacagactgcctcctcaagtgggtccctgacccctgtgcctcctgactgggagacacatcccaggaggggttgagagacacctcatacaggaaagctctggctggcatatggcaggtgcccctctgggrcaaagcttccagaggaaggaacaggcaacagtctttgctgttctgcagcctctgctggtgatacccagggaaacagggtcwggagtggaccttcagcaaactccagcagacctgctgcagaggggcctgactgttacaaggaaaactaacagaaaggartagcatcaacatcaacaaaaaggacatccacacagaaaccccatccgaagatcaccaacataaaaaaccaaaggtrgataaatccatgaagatgaggaaaaaccagtgcaaaaaggctgaaaattccaaaaacaagaatgcctcttctcccccaaagcatcacagctcctctccagtaagggaacgaaactggacagagaatgagtttcatgaattgacagaagtattcttcagaaggtgggtaacagcaaactctctgagctaaaggagcatgttctaacccaaagcaaggaagctaagaacattgaaaaatggctagaggaattgctaaccagaataaccagttcagagaagaacataaatgacctgatggagctgaagaacatagcaggagaactttgtgaagcacacacaagtatcaatagccgaattgatcaagtggaagacaggatatcattattaacgatataatgaaattaaggcagaaacaagttttttgaaaccaatgagagcaaagacacaacgtaccagaatctctgggacacagctaaagcagtgtttagagggaaatttatagcactaaatgcccatggaagaaagcagaatagatcaattgagatgataattaatagactaccagccagaaaaagcccaagactagatagattcacagcccagttctaccatagggacaaagaggagttagtaccattccttctgaaacttttccaaacaatagaaaaataggaactcctccctaactcattttatggggccagcatcatcctgataccaaaacctggcagagatacaacaacaaaaaaagaatatttcatgccagtattccctgatgaacatcagtgcagaaatcctcagtaaaatactggcaaaccaaatccagcagcacatcaaaaagtttatccaccaagatcaagtcagcttcatccctgggatgcaagcctggttcaacatacacaaatcaaaaaacgtaacccatcagataaacagaaccgatgataaaaaccacatgattatctcaatagatgcagaaaaggcctttgacaaaactcaacaccccttcatgctaaaaactctcaataaactaggtattgatggaacgtgtctcaaaataataagagctatttatgacaaacccacagccaatatcataccgaatgggtaaaagccggaagcattccctttgaaaaccacacaggacaaggatgccctctctcaacattcctattcaacacagtattggaagttctggccagggcaatgaggcaagagaaagaaataaagtgtattcaaatagaaagagaggaagtcaaattgtctctgtttgcagatgacatgattgtatatttagaacaccctatcctgtcagcccaaaatctccttaacctacctgataatcagcttcagcaaagtctcaggatagaaaatcaatgtgcaaaaatcacaagcattactatacaccagtaatagacaaacagtgcaaaatcatgagtcaactcctattcacaattgctaccaagagaataaaatacctaggaatacaacttatgagggatgtgaaggacctcttccaggagaactacaaactactgctcaaagaaataagagaggacacaaacaaatgcaaaaacattccatgctcatggataggaagaatcagtatcgtgaaaatggccatactgcctaaagtaatttatagattcaatgctctccccataaagctaccattgactttcttcacagagttagaaaaaaacaaatttaaattttatatggaaccaaaaaggagcctgcatagacaagacaatcctaagcaaaaagaacaaagctggaggcatcatggtacctgacttcaaactatactgcaagcctacagtaaccaaaacatcatggtactgataccaaaacagatatatagaccaatggaacagaacagaggcctcagaaatgctcataatgctacacatctacaaccatctgatttttgacaaacctgacataagccatggggaaaggattccctatttaataaatgctattgggaaaactggctagccatatgcagaaaactgaaactggaccccttcctgacaccttatacaaaacttaagatggattaaaggcttaaatataagacctaaaaccataaaaaccctagaagaaaacctaggcaataccattcaggacataggcatgggcaaagtcttcatgactcaaacaccaaaaacaatggcaacaaaagcccaaatagacaaatgggatctaaataaactgaagagcttctgcacagcataagaaactatcatcggagtgaacaggcaacctacagaatgggagaaaatttttgcaatctatccatctgacaaagggctaatatccagaatctacaaggaacttaaacaaatttacaagaaaaaaaacaaacaacaaaaaaccccatcaaaaagtgggtgaaggatatcaacagacacttctcaaaagaagacatgcagctaacaaacatatgaaaaaaactcatcatcactggtcattagagaaatacaaatcaagatcacagtgagatactatctcatgccagttacaatgacgatcattaaaaagtcaggagacaacagatgctggagaggatgtggagaaataggaatgcttttacactgttggtgggagtgtaaactagttcaaccattgtggaagacagtgtggtgattcctcaaggatctagaaccagaaataccatttgacccagcaatgccattactgggtatatacttaaaggtttgtaagtcattctactataaagacacatgcacatgtgtgtttattgcagcactgtccacaatagcaaagacttggagccaacccaactgtgcatcagtgatagactggataaagaaaatgtggcacatayacaccatggaatactatgcagccatgaaaaagatgggttcatgtcctttgccaggacatgcataaagctggaaaccataattctcagcaaactaacacaagaacagaaaaccaaacaccacatgatctcactcataattggaagttgaacaatgaaaacacatggaaacagggagggcaacattacacactgaagcttcttggagagtgggggactaggggagggatagcaataggagaaataactaatgtagatgagttgatgagtgcagcaaaccactattccacgtgtatacttatgtaacaaactggtatgttctgcacatgtatcctagcacttaaagtataatttaaaaaagtaataaaatgaagtatataaaaatggcaaaaaactgttaacacagtgccagtcacatgggcattgcttaatcagaggcaactgttatcagccttgactgtttccctcctacatctttagcttcactacctgccacttctgtccccatagtgtaccctttgttggttcccttcattcatctagtttattctgtgcttataccatctcaaggactatttaaaaagttgtygaactagtctcaaatttgaacttctttatttcacattttgtcttgtattaattggacatctacttgagtttagccttaatgaatcatatgtaccttgagagtaggaaacatattcaatcaacattctggaccttgtattacccagcacagtgccttacatatggttggtgcaatctggtaattaattgcatggcaaattggattgaagataatagtgattatagttattatgcattattgagtttatgatgtcatatgttgttctacatgatttgtatttatttattttcgtatcgacctaatctgatgattattattgtaatcctgattttatggttgagaaaactgagggacaaaggtgttaagaaatttacctgaggtcacacaactaacaggagttgaggccacctttaaaagtcaargggtttggctctaaaacccaagtatttaaatggtcatgagtgtttgtacattgtgaattttcacacatttatgtgaaagtggactaggtttcagcgacagatcaatatctgcttttgaaaaaaatactatagactcacagaatttaagaaatgtaaagaaagctcagttttgcaaaagctgaagcccaagaaggcaaagtcagttgcctcaatctcacaactactacatagctgagacagaatgagaatccacatcttctgatttcagatgaagttttcgttctgttattccacagctatctcctgatgtgacctgtaggaaatgccatttctgacttttaaaaatacttaccatatgtcaggtatggttgtaattggtttacaaatattaataaatttaattctcacattcacccattatgttgataaagaacctgaagcacagaccagctcactgacttgctcaaggtcaattacagatagtaagtagggaaccaggattaaaacccagcccagggcactggagtataaccatactactaaagctatctctcaaaatgttggattaactagatatttgtgaacgaaaaaggaagactatccagacaaacgagatcatttggtaccagaaccaagcatcaaatattgaagacagatgacatttcaagaatggtaaatcaaatagtcaacttatttccttagagtaatgacagacaaaaagagagaacacttaaaacaggaatgatgtgctattgaaacaaaagaattgctaaaataatgatatggagtagacacaaagaattttgcaagtaagaagaggatttgtaagaaatgtagccagttctgggtcattacagcagttgcgaaaaggtgacatcactaaaggctcagttgggaatacgcataatttctgcaggaagctgattaaggagctagacattttttgaagggaggcacttggtccttggagtttccctgacaacttgcataacattggaactcagtgtggtaaattgttcttcacatcaaaatgaatttgcttacactgatatgggaagctactgtgattgctccaggaaatgcaaggaaaagagaaaagagacatatttgaagtggaaaaaaatgacttaacttcacaaaggcagttaaaaaattggaatgtcttgttaccaattttgcaaatacttaaaaaccaactcagcctgagtaaaaacagtctactgatgaagactctcatatgggctctgatcagtttaagcatctggtttgctacagttaatgccaaatttagtgcatacacaatagatgtaaatgaataaatgttgccacaaaagagagagaaaatattgtatatgtctaaacacaaggttactacttttttcctttctatccctcataaaaaggaaatgccttaaattcaaatccttataaatgttctcataataccgggtattatcccagttctgttattttgaacacaagaaactattttggggagaaaaaatgacattatctatgccagcttatgattttaattgaaattatctggagaataaattttaaaaaaagaccaaaaaaccccctctcaacaaataattagttattattcctgggagcgtagtctcacaattgcaaatattgaatgtcattgtttaattagcttgattgtgatgacaattctgcattatatgtgtatatatatatatctctaatcatcaagttgtatactttaaatatatggaatttaaaattatcaattatacttcagtaaatcttgaaaaaatacaaatgtaaatactgataaccatacaaaacacttaataacacagttcagtgtttggttacattgtaaagatcacaaatacagacctattagacaaatggggaaggaagaagcgctgatactatgcagttggattcgtgtgactttgctggaaaaggcatcaaatacagattcaaaaagtgctttatctcaaacaacttagacagatggaatggtgatgaatttggaaaatctgagagaacttgaaaagtggctctgggttggggaaatcctttaggtcaagattcatgggaagaaattaaataaaattatttaatatttttatagtaaagaaaagataatatttctatactaatatataatatagtccatgaaatgatatacttaatatagctatgcctaataactgaacccataaatcaaatattatacagatatttatttaatatattccttaaagttattcaagttggtctagaattttttttcattctttagatgttgtcattaattaaaaaaaataattattttaattatatttggaatttatttctatgtaggcatttacattttctcctatctgcagcattctgtgggaaaagggatcaaaggagattttgaagttattgcgaagaaatctataatagcaaaggaagaagccagggtttctggacatatcgatagtattatggaaagaaatgcaaaggaatttaagacaagataggctacattcagggtgatatggtcatagacaaggaatttcaaatgaagttatgtttaactacttaaggctggtactagagcacacctatggtacttcatctagttttgatattttaaatttataaaayatgtaatttctgttgaaggtgtacagtgtcactttatgataagcttcagaaaaagatgttgaaaaacctcatgattaaatgaactgttttctccaaggtaagaaaagcctctggattcatccttttccagtgtgcaggttgtgatagaattaagttattttgatctgttttatttttaccagcagcaagatctgtgtatactcagtaacctcatccattcattctttgactcctttacttgtctctcaatgttctttgtcttccattgaatacttgctttgagccataaactgtgcaagcactgagaytgcagctctgaaaattgttgtgctttctctcaaggagcccacagggctgagagaatcaacaataatcaggcaattataatggagcataataagtattgtaatggaggtataagcaggatctatgagaggacagaggcggggaagggaaatcatagtaacctctccagagtaactcctgtctcagatgagccttgacaaagtttaggatgagggacagaaggagggagggagtagagaaagagaaagagagaggagagaagaggagagcaaaatagggctgagagggctgccatcacctgcccattgcttgacatgcaaaccttttactttttcctccatcattttttattttgtaccctataattattgttgaactcattttaccccaaaaagtctgccctgattatgtttttaatctatatggaaagattttcaagatttaaggtgaacagctgatttttctatgaaatgtttttgtttcaatgatactctttacattggttaattaacctgattcaaaatctcactgtggttggttctaattcttgtgattaggatttattattttccttaagctagttcccagcaccatcagtagctctgcaaaccttttctattctttgtcatgattctatctcaatgtcagtttctctgagctcatgttttatcaatttgttattttcagttcacttcttatttatttcttctcttctcagatgtctccttagtagtgaaatggatctcatcttcccttctttggtgctcagctccagagtgagctcacctctctgacaccgttttgatctcttactctttctggaagtagtaggtctgagaattgatgtgctttctttcaaggagcctgcaggagtttctgctgaaatcttatccatcaccctccttagtcagccttcctagagcaggtggcataatctactcttgccaagagctctgagaagccaccaataggccagtttctgcccagggtctatggtaattcccattaccacttttctgcagtagtagcaggatgtataccatctggaccattcggtgccatcaggaaatggtcaaaatatttgcatgcccctcaggttcaagtaaataaacagcagcagcagcagcaacaacaacatttccagtgaaaatgaccctgtcactcttctacctgatactttcctcatcttttcccaagaaatcacctttcccccgaaaaaagattatctgctctccatcttctctctcctgtgaggctattttgtatttgtctagagcactccagaagtgggcaactgaagttactagcattacttgaccatggttatagtttttatacagattggcagatgctttttacagtctgtggctggatttcattggaaaaagcttaaaattcacaggaggaggaaagtacttctctcccaggatccccactgagttgataacagtctatgggaagtcatctatttaaacagaaataaacatgccttgggatgccaggagactattttcagttttattaagctattttcagctttattaagaaatctgtgtttaatttttgcagcattttcagtcctgttcatttagcttttctctgtgtgtggatcaattagatcacttgatgagaatgcagacatcgcattctgctccttccattgcattctgctccttccaggatcacagtacatttggaggagagtaaagaacctggaacaccttcaatcacccagccagaaacttgtgcttaattgacttttcatgggaaaaagtagtcctgattagatattgcctgtgtctgggtcctgggaaatttcaacattttattgtcttatatgtgtgtgtgtgtgtgtgtgtgtgtgtgtgtgtgtgtgtgtgtgtttattttttggacccatataaattggtagattggtcacctgtaataagttagacactgttttaggtcagggtgagcaatctgtgcatatgtaaagggtcagatagtaaacattttaggcactgtagactttatggtcttcatcgcaactatttaactttgacatctgaaagcaataggagccatagataatatgtagactaataagtggctgtcctctaagaagactttatttatggacattgtaatttatattttgaatacttttatataacatgtaatattttctttaatttgtttttcaactatacaaaaatatgagccatcatttgctcccatgccatactaaataagcctgcaggccataattggtgaacctctgctataggcaaagcagcttaagtaataaacaggacagaaaccccgacctcttgtgactttcgtagagaaattagacaatgatcacgtaaacacacaaataatgaatattatttcaaattctaagtgctaggaagaaaggaaaacaaaacaaaacaaaacagctgttgtgactgaaaacccctggtggtaagaggactgagggcatgggctgcattagctgcttagagaagacttctctaagatagcatctgaggtgttctctgaatgatgccagggagacatgtgaatgttgaaggaacagcaaaggcaaagctgtgagtcagggatgagctcaggatgtttaaagaagcaagaatacttttctggcttgagagaatattacagaggagaaggaggaaggtaatgaaatgaaaaaggaaggtagggacaagtgaggtaggacctggaggccagaagaagggctttaggtttattcacatttctgggctaggacatgggttttttaataagctgaagagtgatgagaagtggtttatacctttagacagatcactttggctgctgtgtggatgagggaccatcattggaaaatgagagtagaggttaggaggagggtactcaggaggctatagtgggctctagcagtccaaaatagaggcttttccattttctcttcttctaacacttttctcatgtgtgagtctggtagaagcttgggggaaggtgagaaataatgacacaatgcagttcaggttggactactgaatgagattcgcaccaataacattttcaaattaactccatattatttctttttttaattattatactttaagctctagggtacacgggcacaacgtcgaggttggttacatatgtatacatgtcccatgttggcatgctgtacccattaacttgtctttacattaggtatatctcctaatgctatccctctccccaccccacaacaggccccaatgtgtgatgttccccatcctgtgtccaagtgttctcattgttcaattcccacctatgagtgagaacatgcagtgtttggttttctgtccttgcgatagtttgctgagaatgatggtttccagcttcatccacgtccccacaaagaacatgaactcatcttttttatgactgcatattattccatggtgtatatgtgccacattttcttaatccagtctgtcattgatggacatttgagttggttccaagtctttgctattgtgaatagtgccacaataaacatacgtgtgcatgtgtctttatagcagcatgatttataatcctttgggtatatacccagtaatgggatggctgggtcaaatggtatttctagttttagatccttgaggaatcgccacactgtcttccacaatggttgaactagtttacagtcccaccaacagtgtaaaagcattcctatttctccacatcctctccagcacctattgtttcaggactttttaatgatcgccattctaactggcatgcaatggtatctcattgtggttttcattttcatttctctgatgaccagtgatgatgagcattttttcatgtgtcttttggctgcacaaatgtcttcttttgagaagtgtctgttcatatcctttgcccactttttgatggggttatttgattttttcttgtaaatttgcttaagttcttggtagtttctggatattatccctttgtcagatgggtagattgtaaaaattttctcccattctgtaggttaaccattcactctgatggtagtttcttttgctgtgcagaagctctttagtttaattagatcccatttgtcaaattttgcttttgtacaaaagccaacagaaggcaacaaaactccatattatttctaatgctcacaatgatagctaaggatttgggggatatttaataatgtagcattatttcttttaatcctcacagcaattctgtaaggcaggtgtcattatttactccatcaatgaagaaattgaggtactaatatgttctgcaataggtgaagatatctcaaaactggcaagtggcagaggcagtataggttccatgcttggctcttaagcccatgatctgttcacttgctcatcttctcctctgttttagttatctactgctacatataaaaccaacccaaagtgttgtggctttaaacaacaaaaatttatgatttctcatgattcgtgggttgaccaggctcagctgggtggttcttctgttccatatgttgttgactggaattatatgtgaggttgcagtcagatagaagcccatcacagcctgaggcctcccagatgccttcactgtcatggctagtagttggtactacttggctgaggtgtctcttgttttcctccatgtgacttctaaaccaccattatgttagacagaatttcttactgaatgatagatggattctgacaaggaagcttccagaaaaccatgttctaatgtgcaaatggttatcaagctcagcatgaattacatttgatgatgttattacctcagagtaattcatatggccagttatgaaattaaacttaaaaaagaatctacatgaaaggtgggctcatttatggaaccaacccatacctataatattattattttggcttctgcctttagatagaaatgtaggggaatggtttcctcttttgtagaatatcagggccctcttctcagtaattaaagatagactaaggcaccagatatttattaactcatgtgttgattagacatttgttggtttttttcctgtgagtgaaacactgctctaggttctgtgggagaaaacaaaaaggagaatgggggctaggcacagtgattcatgcctggaatttcagcattttggaaggcctaggtgggaggatcacttgatgtgaggagtttgagatcagcctgggcagtatagtgagaccctatctctacaaaaaaattaaaaaaaaaaatagcttggcatggcagcacatgcctgtggtcctaggaactcaagagactgaagcgggaggatcactggggccctggtatttgagaatagagcaagccatgatcatgctgcttcatgccaacctgggcacaagagcaagaccccatatctctcttttgctctatatctatatctatatctatatctatatctatatctatatctatatctatatctatcttctgtctatctatacacatacatacatatatagatagataaatagaaacaaataaataacagtgtaagacatgggccgttccctcaaggtgcttagtgtctaggagaaaatatgctaccagctggttatctaaaacatatgaatgcatgtttgtagataaaatgtatactttaagatatattgcaaattgtttttttagaaggctgatgtttttcaaaagaagacatacaaattgctaacaggtatgtgaaaaaatggtcaccactaatcatcagagaaatgcaaattataaccacaatgagatattatcttaccctagtcagaattgctattattaaaaagtcaaaaagcctaatgggtttccatctgactgtagccttatgtatgattccctctccatgaggatgtggagaaaatataactcttatgcactgttagtgggaatgtaaattagtacaacctctatagaaaacagcgtggagatttctcaaagatctaaaactagaactaccattctattcagcaatctcacttctgcgtagttactcaaaggaaaagaaatcaatataccaaaaagatacatgcacttgtatgtttatcacagcactattcacgatagcaaagttgtggaatcaacctaagcgtccatcactcaggttgaaactataagaaaacagaaacatgtttcttacagtttaggaggctgggaaacccaggatcaaggtgctggagaaagcttgatctctgcctccaaggtggtgcctcattgctgagtccactggaggggataatcactgcgtcctcacatggtggaaggcaaaagggcaaaagagtcctctctttaaccttgagcccttttataagtgtgctaatcctattcatggggcagaattaatcacctcccagtggccactcctcttaatactcttgcactggggattaatttgcaacatgaatttcggggaaaccatcattcaaaccattttgaatggtcacatgctcatttaattttaatttctaagcagaacttactgatcatggttataatacaagtgtcgggtattctaatgagatacaaagccaaagaaaaaccaccatgccatttaacatgtacttagactattccacacactgtctaaatgcgtcctatgtattatttccttttatctctgtagatgcctttgtatatgtactgtaattatcttcattacctagataacaaagtcttaggaattgttactttctcaggagtcagagacagggcttgaaccctggtccctttgactccgaagtctattgtctctaccactgtgtgacacagaagtgatgcagtggggaaaggattgcagtgggaaaaggattggaatagtgttcaggacacttgagttccagtccttagggctgaaccaactaatatgttatcctgtacaaatcagcttcttttgtctgtttttttttttctctctctctcctttaaagcataggagtctacagcctacatttctatggtaatttagagcttatattttcctgacagcttacattgtaaatcttctgcactcctattttgtcttgccctgttgtatttttttaaagagtatatatcacctaatattctgtatcatcgacttaattattctatattgtttcttccatttcccctgcagtagggtgcaaataccagtgccaccaa

SEQ ID NO: 93475 - DNA, 25721 bp, Homo sapiens
agacaggactcttaggcataggtgggagtgtaacttgtggaattagaagacacgctccatgctacctgtattagttcattttcacattgttataaagaactacctgagacttatttatttatttatttatttatttatttgacagagtcttgctctgttgccaggctggagtgcagtgacacgatcttggctcactgcaacttccacctcctgggtacgctcctcagcctcccgagtagctgggaccacaggcgcccgccaccatgtctggctaatttttttgcattttagtagagacggggtttcaccatgttggccaggatggtcttgatctcctgacctcatgatccacccgtctcgacctcccaaagtgctgggattacaggcgtgagccaccacgcccagccgagactgagtaatttataaagaaaagaggtttaattgactcacagttctgcatggctggggaggccttgggaaacttagaatcataacggaaggtaaaagagaagtgagcacctccttcacaaggcggcaggagagagagagcgagggggatgtgctacacttttaaaccatcggatctcgtgagaactcactcaatagcaccagaacagcatgggggaacctgtccccatgatccaatcacctcctaccaggtccctcttttgacacgtggggattacaatttgagatgagatttgaggggggacacagagccataccatatcactacccaaagcaatctacagattccatgcaattatcaaaataccactgacactcttcacagaaatagaaaaaccctaacatttgcatagaatcacaaaagaccccgaataaccaaagtgtcctgagcaaaaagaacaaaattgaaggtatcacattaccagacttcaaaatatactacaaagccatagtaacagcatagtactggcataaaaacagacatgtaaaccaatggaaccaaatagagacaccagaaattaattcatgtatctacagccaactgttttgtttttgagacagggtctcactctgtcacctaggctggagtgcagtggtgcaattatggctcactgcagcctcaaactcctgggatcaagcgatcctcctgccttagtcccaagtagtaggatctacaggtgtgaccaccatgcttggctaatttttttttttttaatggaggtagggtctcactacgttgcccagctggtctcaagctcctgagctcaagcgatcctcttgccttagcctcccaaactgctgggattataggtgtgagccactgcacctggccagccaattggtttttgataaaggtgccaagaacactcattgaggaaaggaccatctcttcaatagatggtgctgagaaaactggatattcaaatgtagaagaatgaaacccccacctttcatcctatataaaaatcaacttaggtcaggcacgatggctcatgcctgtaatcccagcactttgggaggccgaggcggacggagcacctgaggttgggagtttgagaccagcctgaccaacatgcagaaaccctgtctctactaaaaatatgaaattagccaggtatggtggcacatgcctgtaatcccagctactcaggaggctgaggcaggagaatcacttgaacccaggaggcagaggttacggtgagctgagatcgcaccattgcactcyagcctgggcaacaagagtgaaactccgtctcaaaaaagaaaaaaaaaaaaatcaactcaaaatggatcaaagatctaaatggaagacctgaaactataaaacaactagaagaaaacataggggaaacacttcaggacattggtctgggaaaatattttatgaataagacctcaaaagaacaggaaacagaagggaaaataaacaagtgggattaaataaaacaggtcaggcacagtggttcacacctgtaatcccagcactttgggagaccgaggcaggcagaccatgaggtcacgagttcgagaccagcctgaccaacatggtgaaaccccgtctctactaaaaatacaaaaattagccaggtgtggtgatgtgtgcctgtaatcccagctacttgggaggctgaggcaggagaatcgcttgatcccaggaggcagaggttgcagtaaactgagattacgccactgcactccagcctgggtgacagagcaaggctccgtctcaaaaacaaaacaaagcaaaacaaaaccagcttctacaccacaaagaaaacaacagagtgaaaagacaacctacagaatgggagaaaatatttgcaaagtactcatttaacaggggattaatatcccgtatatacaaggaactcaatcatctctacagcaaaaaaacaaaaacaaaaacaaaccaaaaaaaccccacaaaaaacaaaaaacaaacaatttgatttaaaaaatgggcaaatgggctgggcacaatggctcacacctgtaatcccagcactttgggaggccaaagagggtggatcacttgatgtcaggagttcaaggcaagcctggccaatatggtgaaaccccgtctctactaaaaatacaaaaaaaattaaccgggcgtggtggtgcacacttgtagtcccagctactcaggaggctgaggtgggagaatcgcttgaacccgggaggtggaggttgcagtaagccaagatcacacaactgcactccagcctgggtgatagagtgagattttgtctcaagaaaagaattccaggccaggtgcrgtggctcacgcctgtaatcccagcactttagaaggctgaggtgggcagatcacgaggtcaggaaatcaaaaccatcctggttaacacggtgaaaccccgtctctacttaaaaatacaaaaaattagccaggcatggtggcaggcgcctgtagtcccagctacttgggaggctgaggaaggagaatggcgtgaacccaggaggcagagcttacagtgagccgagattgtgccactgcactccagcctgggtgacagagcaagactctgtctcaaaaaaaaaaaaaaagaaaagaaaagaaaaagaattccattgtacgaatgtaccatgatttatttaaccagttggcagaccttaagttatttatgatcattacaaatgatgctgcaaggaactatatattggcatatatgggaatatttctgtaggaaaaattcctagaagtggaattattagatcaaagaggtgtrttagttattgccaaatttcccttttaagaagtttcatcaatctttgctcttaccaataatattttcccacaccttgaccaacccactgtattacaaaactgtagcagtcttttaggaagaaaatgatacgtctttctgacaggtatgatctcggtttacatttctcttatcacaacttaggtcagaaggcatgagattagacagagtgagacttttgtctcaaaaaaaaaaacacacacacacaaacaaacaaacaaacaaaaaaaacggctaatgacctaaacagacatttctcaaaagaagacatacaaatggccaagaattatatgaagaaaatgctcaccatcactaatcatcagggaattgcacattttgataataggatgcctattatcaaaaaggcaaaaaataaatgctgacagggatgtggaggaaaaggaactcatacacactattggtgggaatgtacactagtacagccactatgcagaacagtatgtaggtatgtgaacctcaaatatctgagacagctctcagtttatttagaaagtttattttgctaatgttgaggatgtgcacctgtgacacagcctcaggaggtcctgatcacatgtgcccaaggtggtcagagcacagctcggttttacacattttagggagataagagacatcaatcaacatatgtaagatgaacattggttctgtctggaaaggtgagacaactcgaagtggggagggagcttccagctcataggtagacaagacacaaatgattgcaattcttttgagtttctgattagcctctccaaaggaggcaatcacatatgcatttatctcagtgagcagagggatgactttgaatagaatgggaggcagctttactctacgcagttcccagcgtgacttttccctttagcttagtgattttggggcagcaaatttattttcctttcacaggtaccacagaaaactacaagcagaactaccatatgatccagcagtttcactgctgagcatttatccaaaggaaaggaaatcagtatggaagagacgtcttcactctcatgtttattgcagcactattcacaatagccaagatagtgaatcgacctacatgtccaacagcagatgaatgggtagagaaaatgtggtatagggccaggcacagtggttcatacctgtaatcccagctctttgggaggcagaagcaggaagatcccttgaagctaagagtttgagaccagactaggcgtggtggctcatgcctgcaatcctagtgatacagctcccatgactggagaaacaccagggttctttctctctcgctgattagataaacgacacgggcacacgtggagttgttttaaggggcggaaagtttaataggcaagaaagaagaaagaaagaagaaaacggctcccccgtacagagggagcggggctccaaacggacaaaccccgtgtgcgcggaaagtagtcctttatattgggaggctggaggaggcagtgtctgatttgcatagggcccaggggattggtttgaccaggtgtgtcattcacatagcctgcgaaaaacctggtcctcccaccttagccttttaatatgcaaatgcaggtatccttgatgtcctgcattcttagagccatctggaggtggtcacgacacctgacacacgttgggacaaggagaagagggcgggaatcgctacattggatggacctagtttctgacagcctgtgtttgcatatcaaagcttgccagcctgcttttctgttagaaaagaaatgttgccgccgggcccggtggctcacgcctataatcccaaagctttgggaggccgaggcggacggggcggatcacgaggtcaggagtttgagaccagcctggccaacatggtgaaaccctgtctgtacttaaaatacaaaaaattagccgggctggtggcaggcgcctgtaatcccagctacacgggaggttgaggcaggagggaggatcgcttgaacccgggatgtggagaccgcaacactgcactccagcctgggtgactgagtgagtctcaaaaaaaaccctgaaatgtttggggtgggggggtgcttttattaaaagaaaaagcctccaacctggctaacatggtgaaaccccgtctctactaaaaatacaaaaaaattagccgggcgtggtggcgggcgcctgtagttccagctacttgggaggctgaggcaggagaatggcgtgaactcgggaggcggagcttgcagtgagccgagattgcgccactgcactccagcctgggcgagagtgagactctgtctcaaaaaacaaaaacaaaacaaaaaaaagaataagccttactgaggactccttacccttactgtctgcctaaaatagtttcttaataactcctatattaccagcactttgcgaggccgaggtaggcggatcacctgaggtcaggagtttgagaccagcctggccaacatggtgagactccgtctctactaaaaatacaaaaattagcctggcgtggtggcagacgcctgtaatcccagctactcaggaggctggggcaggagaatctcttgaacccaggaggcagaggttgcagtgaccagaaatcacgccactgcactccagcctggtcaacagagccagactctgtctcaaataaaaataaaaataaaagtttaagaccagcctgtgcaacatgtcccatctgtacaaaaaataaaaaataaaataaaataaattaaaaaaataagaagctctcttccgaccgtggggcagatgccctggcagcccgcccctttcccacaccgcctccccggcacacgccgcacctgtcagccctctgagctccgaggtgcggtgcaggctgagccrctgcctgagccgctgctccacgtcctgggccttagcttcccgctgcagacctgccggccgattcttcgctgccctcccsgtctcatgaagccgctggtcgtgtttgtccacggcggtcccggcgcgctggcatccttgagaaagatggctacacacacctttctgcaggagagttacttcatgatgaaaggaagagcccagattcacagtatggtgaactcactgaaaattacattaaagaaggaaacatgggaccagtggagataaccatcagtttattaaagagggaaatggatcagacaatggctgtcagtgctcaaaagagtacatctttgatcgatggatgggtttmcaagaaatcaagacaaccttcaaggttggaacaacggaccgggcgcagtggctcacgcctgtaatcccagcactttgggaggccaaggggggtggatcacctcaggtcaggagttcaccaccagcctagccaacatggtgaaaccccgtctctactaaaaatacaaaaaattagccaggcgtggtgsggcgcgcctgtaatcccaactactcgggaggctgaggcaggagaatctcttgaacccgggaggtggtcgttgcagcaagccaagatcatgccactgcactccagcctgggtaacaagagcgaggctccgtctcaaaaaaaaaaaaaaaaaaaraaaaaagaaaagaaaagaaaagaaaaaaaagaaaaaaaaaggttgaatgggaaggcagatagatgtatctttcattctgtgtgtgtgtggttttttaactgtaataataagatctgtattgaatgatgtcctgagagaggaaagagtagcggtaggagtgatgacaacagagagagcttgagaaagagaattgagacccatcttcagtcaacaaagccaattattgacttatataaagaaatgggggaaagtcaagaaaataaatgtttcccaatctgttgattaagtttttgaagttgtgaagatttttgacaggaaaactaattcgaaacctgaaagcatccttgaaatcttgcttgaatactgctttgatagctgctatcgcgacccctttttaaggcaattttaatctttcaaactacatctcacctagtggctggaaagtataggtaagacaaattaagttttttatgtacttttttttcgtcacagragagagttaattaagagacataacttcatcttagttatggtgctcactaaacaaagaagcgtatcaagctatttttttttattcaaaaagactattcctttcatagtttgtgccttctatgagcaaaactttttcgtatgtgtgtatgtccctttagtaattacaacatgttaggatttagggatacccacttcctccttttcttgcaagttttaaatttccaaccttaagtgaatttgtggaccagatttcaaaggaactttttgtggagtcagttcttgcacaatgtgtttagtaaacaaactcaaagtggattcttagcagtgttttaatatatatcaaataactaacaatttcctatagaaaagtaagaaaacataggctttgttttactacaacttgaacaatgttgtatgacagggcatattctttgcttccaaggtttgggttggaagcactagaggttcagagcctggcagaactgtcagctttattctgacataatctaagggtatggggcaaggatcacatctaatacttgtgttcctcatcctctattatatggtgttattcatgattcaactgatcttaacaaaattcctagcagtggaaccttgaaatgcatgtgactagatttatgctaaaatgattcagttagcattttagtaacacttcaaatgattttttgttcattttctagaccaaatacaaggttaggattaattagaagaagcaatctagttaaatttcccatttgtattttattttcttgaatacttttttttatagttgtttaaaaaaatttttaaatcattgcactttggtcagaaaaataataaatatattttataaatgtttgattcctttccttgctatttgtattcagtaaattattgttttggcatcatgttgaagcactgaaagacgaataatctttaaaaggcttaaaaaaaaaaagccaggtgtggtggcgtgcacttatagtcctagccttgggaggctgaggaaggaggatcacttgagcccagaaggccaaggctgcagtaagttatgatcatgccactgcactccagcctgggcaacagagtgagaccctgtctcaaaaagaaaaaaaaaagtgatttgcagctgtaaaaactgaaaagatttcaaataggaagtagaagactaacttcaccctctccmggtaacctkcgccacctccaggcacttttccctatagtggctgctgtagcatggcttgttcagcttttctttcatctccttctggtgtcccttcctgcactgcagggcaggaaagctaaacactagagtggtagacctaggtgtgattgctgatcacatgcactgcctaaagcctaatcttcatggaggtaagggagggcagtggcatttttgggaggcatactttttttgttttgttttggctagggaagacacaggcaatactttttttttttttttttagagacaggggtgttgcccaggctggagtatagtgctatgatcatagctcactgtaaccccaaactcctaggtttaagtgatcctcccacctcagcctcctgagtagctgggactataagrtgcacaccaccacacccagctaattttttttttttttttttttgtagagacaasggtatcactatgttgtccaggctggtctcaaactcctggcctcaagcaaccctcctgccttggcctcccaaagtgctaatattacaggagtgagccaccayacctgcctataggcaatagttttgctggagtgcagtgatgcaatcatagctcactacagcctcaatctcccagactcaaatgatcttcccacctcaacctcccaagtagcttgggactacaggtgcaccaccatgctggactaatttttaaaaawttttttgtagagaccaggccttgctatgttgctcaggctggtcttgaactcctgagctcaagcgatcttcccaccttggcctcccaaagtgctgggattacatgtgtgagccactgcacctggcaggcaataatctttcatggcagcttcctgaacccgatatcacagctaaggtgtgtgttcctgggactgcagtgatgactacctacctcctcacctgcctgatggcrgcaggggtagtagctcccctggtagcacagytctgcagggttgttttgttttgttttttaagtcattcctggaggctcagtctggtttccactcttgcagtcatttcaatgtcttcgtcagccctcaattatctgtattacattcctttctgcttaaaataagtaggatggtatctgttatctgcaactgagctctgataaggtacctgacatacgataggtatcactaaacgtttgttgaatacatgaatgaatgatgaatgaataggtaaatggaatggagaccaccaagatgtatacagtgagttggacagacgaacctagtggactcaacagaatggtagagcaattgatggatcataagtggacaatgaaaccaatttggtgcatcctaaccagcttttttttttttttttttttttgagacggaatctcactctgtcacccaggctggagtgcagtggtgcaatctcggctcactacaacctccgcctcccgggttcaagygattctcctgcctcagcctcctgagtagctggggttacaggcacgtgccaccacgcccggctaatttttgtatttttagtagagacggggtttcatcatgttggtcaggctggtctggaactcctgacctcgtgatctgcctgcctcagcctcccaaagtgttgggattacaggcatgaaccaccatgcccagcccctaaccagcayttttaaaagatgaaatagaaaagaatagaaaatctcagataagatcacatatggtaaatgtaagtattgttttgtgaaactttagttccatacacacacctacacattgtatatatgcacgagcacacacatgtttgcagtggtgatcatcaaaccagcataacacagacaccaactaattggagctactagttgtctgaatacctgtgtgaaatgtacctttaccatgggttgtagtcaaaaaaagtgattgagatccattgctctatagaatgtagcttaggcttcttgggggtggtggggggaacaagtttccaaggacccttcctacagtgttacccttggctaaaggatactgtccatgactccttcctgccccagggagcttttcctcaatccaggtatgtttttttttttttctttttgagacggagtctcgctctgtcgcccaggctggagtgcagtggcgcgatctcggctcactgcaagctccgcctcccgggttcgcgccattctctcgcctcagcttcccgagtagctgggactacaagcgcctgccaccacgcctggctagttttttgtatttttagtagagaaggggtttcaccgtgtcagccaggatggtctcgatcccctgacctcatcatctgcccacctcggcctcccaaagtgctgggattacaggtgtgagccaccgcgcccggcccaggtatggtcttaagcagagcaatcctccgtgtatggcaacttgggatgttgtgggcacctataattctgcccactcagcatccatgtcctattcctcaggaracagcaaccccctatatccctgcctttggggagctgccctgttcaggttccatgaggttctggtccctagtccccctggtcttctaggaatttctagatgggtgctgaagggaggtgcatagagctgtgcacagctccctgctcccccccacagagagcaggcttcctccctgagaggaaatgaggctgcctgaaggctgaagctgaagagagagacacctgtcagtggttcctctttggagccttgaggccagcctggtgactgacccaatactgtttcttttgctttttattgttaaaattacatactttggcttgaattctttcacttgcagctacaggagttgtgattccctcatggctccttgaggtaagcaaggggccctcactgccaaggcgactaggcacaaatgtggctcagcctcaccgagtgggagaaggaaggggctctagagccagcgagtctacacatgcaccctacgcacaggtggtgtgggcagggtggcagcacggggcattcccctgctatgtcccctctggagacctctctgtgcatgaaccttttgcctgaacacagaggttgtagggagccctccttggcccgtctgaggaaggcccctgtcataggctaagctgcttggaaaagctcagtcccctcccatgggtgaaggcawtggggcagcacacctggccgccagacaccactgcccactctgtccttcaggccaaagccctagggtcaaagggccagcccagtccaggaggaggcggcaggtcagctccctcttctccctccrggcctgtctttctcccaagctgagctgatagcctctcagcagggccagcctgtcccgggaagaagtaaaatgagaagtgtgtgttctgagccctgcccctggttcagagtatgttgtgtgggtggggtgactagaagctgggaaagagctgatctcccttgggcatgctgggcctctccttctagagaccctcctgtcctcacagacagagcagggcaaccccaccctcaccctgcacccctggctcaatggctcaggtccccctgctctgactctagcattgccaccaccarcccagctttccactgaggagccacctcaacaggggctattcccacagaccctcaagttcctttgcacgctgaccgccccatctccaatctgtatccccaacaagcagacaccatctccttgctgttctacccacagctactcactgtcacttccaaacctttgcccaccctgtacccctggttggaaacccttagtctctctgcttgccaaatcccagtcccccttcaaggcttagcaaaacagcgcggccctctcctgccagggtccgggacatacaaccttgaggcctccacctcctcacctccaaacacttcccactctggtcctcttctctaggaaggctttgctgatctatctttgcatatcaaactcttagggcacccactcgttcctcactctccccagattacttttagagttccttcaggaaggacttgagtaatgcgcaattttcatgaggtcagttttccccagaattttattttggatttcaaagactgataagacttccaaaaaattctgaggactaacagaatttgtgcacatatatttaatatattggccaaaagccagtttcggtggctcaagcctgtaatcccagcactttgggaggccggtggatcacctaagatcaggggttcaagaccagcctggccaacatggtgaaaccctgtctctactaaaaaaaatacaaaaaaattagccaggcgtggtggcgggcgcctgtaatcccagctacttgggaagctgaggcaggagaattgcttgaacctgggaggcagaggttgcagtgagccaagatggcacctctgcactccagcctgggtgacagcgcaagacttggtctcaaaaaaaaaaaaaaagtatatatatatatatatatatatatatgcgccaaaaaagaacatgaacaatgaaacaaaactactactgtatcgtggctattattgcttttttaaaatatatttttaaatattttattttattttttacctccaaataccatcaccattttatttaattattattacttttttgagacagtctatctctgtcacccagattggagtgcagtggcatggctcactgcagcctcaacctcccaggctcgagatcctctcacctcagcctcccatgtatttgggaccataggcagatgccaccatgcccagctaattcttttattttttgtagagacagaggtctcactttgttgccaggttggtcttgaacccctgatcgccattatttcataaaagcacattttaacaccaaagaagtagaaaagacataatttcagaataaataattactttttaaattaaatacatttccctgcctgggcaatatgttgagacgctacctctactaaaaatgcaagaattagctgggcgtggtggcgcgcgcctgtattctcagctacttggaggggggctgaggcaggagacttgcttgaacccaggaggcgaaggctgcagtgagcccagatcgcgcyactgcactacagcctgggtgacacctcaaaaacaaatttttttttaataataataaattgaatatatttacctttaacaaaaacactactacattatccttattgttttcattttgctgcagaccagtgagaacattgtcatggaaaccaccacttgcaccaccagaaagatgcagaagaaaagaagtgagacgttagagactgtcagaggaggggaaggtgaagaggcaggaaatagggggtaagaagtccaccagcaaggtgctcccctgtcctgaactgacccccttctgctcactgaagtctgaggtggccagttttgggccctgggcagagctgtggccatgctcacaggtcaggcagctcagggattcccggcgctggagaccctggtgatcttgttcctactcccccgcaatgcagaggtaccctggacatgtgcctgtgaccggtgctggcaggccatggtacaggacttggagtcaggagcagagctaggcctggctctgctactcaccagctgagttactgggagaagtccctgccytctctgggcctcggtttcctcaactgaaaataaaggttctgaacyagttgtttttgaggaaaccggaagatctctggcttaagaaaaaaaaaagccatgcccataatattttgtacagaattccaggggcttcaccacccctcagggccttcagtgggttccccaggggctgctaaccctgacacgcagttgctggccccttgccttcaaatttgccactttcctaagcagtcaacaatacttctcaagtatctaacggtcatgggggtatgggcaaaggaagccrgtgaagcagtacaaggaagtatccatccccaggcctcctctccagttcacaaatggtctgcgtggatgggtcgctagtcagccaaggtagcagaacacacatatgaagagagctcagaccgcgactgctggagcccccttactaggtaatgatgggaacccccttactagggccaaagccctctggccgcccgcagcagtgtagatcagtggtaagaacttggacccaggagctagaatgccctggatttatatctgactctgccatttaatcctgttccttgggcaagtaactttatcttgagccttcaggttcctagtctgtaaaacagggctaagagttacrcagcagaaatgatagtagatgctaaatattccaagactcctttgaatttcccagcctcccttgcagaaggttagagggttgggatcatgtgactagttccagcaggtggtttgtgagtggagaaggcaggtcttccatggagaycttggatgctagtttttttttttttttttgagacagggtctcactctgttgcccatgctggagtgcagtggcacgatcataactcactgcagcttcagcctcccgagtagccaggactacatgcatgtgccaccatgtctggctaatttcttaaattttttttgtagcaatgaggtctcactatattgcccagggctggccttgaactcctgagctcacgagatcctctcagccgggcatggtgactcccactggtaatcccagcactttgcggaggttgcagtgagccgagattgtgcyattgcacttcagcctgggcaatagcgtgagactctgtctcaaaaaaaaaaaaaaaaaaaaaaaaaaaaaaaaccaaaaaaacccccaaaacaactgatcctctctccttggcctcccgaagtgctgtgaatacatgcatgagccaccatgcccagccagaggccagtcttatagatggctacaggatggaagaagggtatcttgccccaaatcagactgtacataaagcattattgtgccaagccacgaaattccaggagttctgttgttacagccagtgttaattactctgtgacagctagtgttaatacagggagggctcacggaaataatggatacaaggccctctgagtgcggtgggggctgttattcttggctgttattccccaccaagacaggattcctcggttcatttcttaagcgaaacttcaaaagcagaagcaggctgggagtggtggctcacgtctgtaatcccaccacwttgggaggccgaggcaggagaatctcttgagcccatgagttcaagaccagcctggacaacataaggacaacctgtctctataacaaatattaacaatacaaaattaaaaaaaaatagaaattaaaaaaaagcagaagcaggcaggtggggtgaggtggaagcttcatccatagggaagtcctgaggaaggcctgcctcccccggttccaggattgctctgtgcagctctagctctcccttaaccctcctccctattctgagttttcttctcttcccacttctccattttgcccccacatcttgactttcacacaattcacagacaaatccttagacaattaatagaatgattaagactgcaagagatttaagacttagagaccatcttgtcccacctcctggttcttacagaagaggagaatggggcctgcagcgggtgtgagcagcccagagggtggggctggattatcccgaaggtaaggggagaatctggggctgcaagggcagacagagaatcaacatcaggaaggaagctctttttatttcagcatatatgttttgtgccgtttataaaaataaagttttgaggccaggtgcggtggctcacacctgtaatcccagcactttgggaggctgaagcaggaccatcacttgaggccaggagttagagaccagcctgggcgacatggggaracccccgtctctacagaaatttttaaaattatcccggcgtggtggcgcacacctgtagtcccagctactcgggaggctgaggcaggaggatcacttgaacctgggaggcggagatggcagtgagccgagatcacgccactgcactgggcgacagtgcgagactccgtctgtaaaataaataaatacaataaaatagagttttatcttacaataaaaatagagttttatcttacagtttcaagcttctacttggaagtaacacgtatggaggctcccagggcccctacagtctggaatcccgcccgtgcgagcctgagcgcctttcctccctccttcccttccgcaggcgtcctcgccctccacgtccctcctccgcsggggtggcctggggcgccgggtcacgtggccggggaagaggttttatcccgcggcccctcggaaccccgccgctgctctgccgcccaggcccatggccgcagccctggcgctcgtggcgggggtcctgtcgggggcggtgctgcccctctggagcgcgcttccgcaatataaaaaggtgagccggggagcgcgcccagccggccgcgaccgcaggagagggtggccccgccgccggggcactggagcccgaaggcgccgggcagcctgaaagggagaggtgggtccggaaccacacccaggcgggtagcctggggcatcctcagacggacttcaaaagccgcttcactttcccctggtggcctcagaggggagagaaattggcctatgaccagcaccctcgctccctccacctcccccgcccgtgccccttccgatggcctcrgtcctgggctcgcttccctcccsaaactgctcacaggcaaacccaccctgcatgctctggtttctcctcctcttcttccacctcctctcactgtctagtgattcttccaggcacgagggctctccccttttctcctctttctctccctctttttcgagcccgcagccccttcattctcatcccccaaccctgccccgcaaaatgggacttaagagtacacaccccatgggactcatggaggtgaggggggtccaggaaaggagaggccgagggaaaagtgctaatccccctctcctcctctctgctgccctgggtcctgctgaggggccggggtggggctgggggggggaaccagccccccaaggggtgacaacctcatgacttctcctggatccctgggctctttggcaatggtgggaaccctcccctacccgcccacacgactcagggattgctcccagcctggcagacattctgcctgtccccacagaaaatcacagacaggtgcttccaccactctgagtgctacagtggctgctgcctcatggacttggactccggtggagccttctgtgcccccagggccagaataaccatgatctgcttgccccaggtgaggccctagtatggggcaacttctggcaagtagagaagcgggcagggaggttaaaaaaaaaacacctggccccacctgttttttcacctctgtctggagtgcccttcttcttctccacttggcaaactcctactcatggtgcaaaacaactccagccacctcctctgagaaggcttccctccttggagctcctgtaccctggggtcagaccctcagcagaccatgtatctccctaactggccatgtcttttctctgcctctcccagtggttggaactcttcaagggcagggatygcatcatattcatctatgaagcacctacccccagcttagtatctgcacatagtaggtgctcaataaatgcttattgttgtttgtttgtttgtttcgagatggagtctcgctctgtcacccaggctagagtgcaatggcatgatctcggctcactgcaacctctgcctcctgggttcaagcgattctygggcctcagcctcccgagtagctgggattacaggggtgcaccgctatgcctggctaattttcgtatctttggtagagatggggttttgccatgttggccaagccggtcttgaactcctgacctcaggtgatccacctggctcggcctcccaaggtgctgggattataggcatgagccaccgtgcccggccaataaatgcttgttgaatgaatgaatatctcttctctcacaccactgaggcagggtaagtaggaaatgaccttccccttactagtccccatctccctgccacagtgacatgatttcttgagaggagcatggcactgcagtggcaggaccacagctttgcagttggacctgagtttaaatcctgacttttccacaccctatctttgtgacttcaagcaggtcatcatggctctctgagccttagtttcctcatctacaaggagaggctraagtacctaccccaccaggctgttgggaagattatgtggtcctggcaaggagagtgtgcagtccagcatggttgtcactcgcttttaggaatgcagggagcagaatgctcagtacgccctgttcctgcccacctggccctgggcccaaacctttctaggatggatggacccagcctctatgtccctgtgtggggagttgccaatgccctaaggaagcagcagggcccctaccatggcctgaccctatagctgaagtggctagagggtttttattttttttattttttgagacagagttttgctcttgttgcccaggctggagtgcaatggcgtgatcttggcccactgcaacctccacctcctgggttcaagcaattcctctgcctcagcctctggagtagctgggattacaggcatgtgctaatttttatattattagtccatgaccatgttggccaggctagtctcaaactcctgacctcaggtgatccacccgcctcggccttccaaagcgctgggattacaggggtgagccaccgygcatggcctaaagggtctttttattatcaccacttgatctgctctatctcatttagtcctcacaacaaccctatgaggggggttactattactgtccccatttgacagatgaggaaaccgagctggagaggttcattgacttgctgaaggtcacgcagttataagctgtagagacagcccaggtctgtcttactccaggcctggtactcttggttctggtccccaagaagtttaagtccccatccttcctgcatcctggtgactcccrattctcatacccactccctgcagaccaagggagctaccaacatcatctgcccttgccggatgggcttgacgtgcatatccaaggacttgatgtgttcccgccggtgccatatgatttagaggaagatgcaggctggtcactgctcccttggggccataggccctggttgccaccaacttgctccaaatccagctcctgagacattaaagtcacttcctgtccttggcctctgtctgtactttctgggcgaggggacctggtggagattgtaccagtccagggggcaggcaaaaggggagactggaggcatgaatgagcttctaatgggatttggccctgtccggaggtcagggtagaactgcaggaagggaatggcacagggagggtgtggtggagcaggggctgggtctgggaaagggctgattctctggttggagggctgtgtgggagagacgggattgaggaatgtacctggagagtgtatgttggggtgcctatggaggggtgtgtggtagggagagactaggtggaggtatctgaatgttttgcggggcgggttgtggggcacaaaagggtagagatcattagagagttggtgagaatgtgcaaagtataaatgcagaaatgcctgtggtgggaaagggacctggtgcatggatgcctccgctctctcaggtattgtcggttcactgcatggacaaagaaactgaggcccagagaagcgacatgacttgccctaggtcatatcattggggtagcagtgaggcctctttctgctgcaagtatcttaaaaaccaactcaaattggtctaggtgaggaggggatttactggtgatgggaaatgaaagtccagaggtcaggcaacccttaggtagggccagagccagcagctctcaggctgaattccttcccagtagtcacaaacattccaggtgtcacctaataacaggtaggatttattgagcacttcctatgtgccagacactgtgcaaagtgctttctttttcatttaattaaaaaatttaagacagcacccaggctggagtgcagtggctcgatcgcagcgtactgcagcctcaaccccctgggctcaaaagatcctcccacgtcagcctcccaagtaactgggactacaggtgtgtgmcaccatgcccggccaattttttttctttttctttttctttttttttttttaatagagacagggcctcactgtattgccctggctggtctcaaactcctgggctcaagtgatcctcctgcctcagcctcccaaagtgctgggattacaagcatgagccactgcgcctggcccaaagtgctttcttaactgtattgactcatctttttgtcacaacagggctatagtaggtgttataattatccctattttacaaacagggtatcgaggctcctaaagtaagggttggaactgagacttgaacccagacaatcctgccccagaggccaggctcttaaccacaaatccaccatgtacatcaatactgtgcctttcagagaaagaaaacatctctgttccacaattttcagcaaacatcctaagatcggttctgattggattggcttagtctgcctgaactaattattgtggtggaatttgctgattggcctagcctgagtattgtgcaggatgggaaaattctgacggggttgggtgctggttttacatggtgttcccacagctgggaggacacccacatggtcggcgtgcaggatatttcgctggaccctagaaaagccaccacgacctgtgggccatgatgctaccccaatggctgctgctgctgttccttctcttcttctttctcttcctcctcaccaggggctcactttctccaacaaaatacaaccttttggtaagaaagctggagagtgcagtcacctccccctccactgtcctaaggcctgtactatttggggaggtgagcrggcatgggggctagtgtgggagaaggccagaagtgggggcagcagggagtgttgggtggaagatgtctcggaggaaagagagaacaacctggtcctggaagctgtgccagggcagtgccaggtgctgctgccacagaggtgaatgtgagagagcccccctgcccatgcgcacatgtggtaagggagacagatattcactcatgcaacacatttttattgagcacctactatatgtaaattatttttctacatttagtgatagggctgtgagcaagaaagataaaaatccttgcccttgtagagctgtcactctagtgtgtgaggcaaagaagtaaaacattacaatagatgctattaataatagcatctatctcaggtgataagcaaggaaagggaaaataagaatcgagctgtgggagtggtggtgtgagaagggtttgcaggtgttttttttttttttctttttctttttcttttttttgggacagagtcttgctttgtcacccaggctggagtgcagtggggcaatctcggctcactgcaaacttagcctcctgagttcaagcgattcccctgcctcagcctcccgagtagctgagattacaggcacccactgccacgcccagctaatttttttttctgtatttttagtagagacagggtttcaccgtattggtcaggctggtcttgaactcctgacctcaagcaatccacccgccttggcctcccaaagtgctaggattacaggcgtaagccaccgcacctggccagggtttgcagttttaaatggggtgctcagggaagagtttactaagaatgtgaaattttagcaaagacctaaagggagggaagtccttcctaaccggcaaagcaggggggtctctgggagaagagcattcaaggtggagggaacagccagggcaaaggtctgggggyggaaatgtgctggcatattcaaggaatagcaaagaggagtaagagagagtggaaatcatgggagatgagctcagagagataaatggaacacagttacaatattctcatttattcaacagttatgcattcagcacctgcaatgtgtaaggactttagtccaagggggctaagaaatatagcagtgaacgtgagagcagaagatccatgtcccagagctgaggttgctagcgggggaaataaattatttttaaacatataaataagatgatttcagagagtcataagtgttgtgaacaaagtacaaccasgtgatggggactgctctgctggtgtccaggaagtcttcagcctgaggcaggagggggaggcagccgggcaaagagtgcaggacagggtgctctgggcagagggccagcaagcgcaaatgccctggggccaggccaggtgtggattcagagccccagtgatggctttgaatccagagaatggcattgtgggaattatcttttaaaaaagactcctctagctattctgggaagaactgacttgaggaggttggggaggtggaagtgagagtggggatggtgagggggtacctgggggaggtcactggcaaggatggaagcagggaggccgggaggcggctatagccaatcctcctttcctgccttattttctttatagcacataatcgtacataataggattatacatatataatataaatattacttattgttatgtatataacatatgtggtaaaaatcacaccttactaggtgctcagatcttgagtttacatggaaatcaatggattcgaacctatgcagaccccctcatcactaccgtcagaacaagatataggacattttcattaccccaaaagcctcactcttactctcctagtcaatagcaccaaaggcaactgtctcctgacttccattattatagattagttttgaactttgtatgatgaaatcacacagtatgtacttttaaaaaaaaatttgggccaggcgcagtggctcacgcctgtaatcctaacactttggaaggccgaggcaagtggatcacctgacgtcaagagttcgagaacagcctgaccaacatggtgaaagcccatctctactaaaaatacaaaattagctgggtgtggtggcacatgcctataatcccagctacttgggaggctgaggcaggagaattgcttgaacccgggaggcagaggttgaactaagccaagaaagtgccattgcactccagcctgggcagtagagtgagactttgtctcaaaaaaaaaagggggggctgggcgcggtggctcatgcctgtaatcccagcattttgggaggccgaggcaggcagatcacgaggtcaggagatcaagaccatcctggctaacacagtgaaaccctgtctctactaaaaatacaaaaaaaattagctgtgcgtggtggcgggtgcctgtaatcccagctactcaggaggctgaggcaggagaatggcgtgaacctgggaggcacagcttgcagtgagccgagatcgcaccactgcattccagcctgggcgacggcgagactctatctccaaaaaaaaaaaaaaaaaaaaatctgacttattttgctcaacgttttttctgtgataccgtatcatttcacttatgtatctcttccctgtcttccctctctagagctgtgtgtgtccaatagtgcagttactagtgtgaacccaaaatatctgagacaggtctcagtcaatttagaaagtttattttgccaaggttagggacacacctgtgatacagcctcaggtggctggggtgcaccttgctttttttttgttttttgttttttggggtatagcttgcttttatacacattggggagacataatatgtcaatcagtacctgtaagatttacattcgtttgatctggaagggtgggacaacttgaagtggggggcatgacttccattccaggtcataggtagatttaaacaaattctgattggcagttggttgaacagctattatcagcagaagggaatgtctgggttaagataaggggttgtggagagcaaggttttatcatgcagatgaagcctccagtaataggcttcatagaaaatagattgtacatgtttctgatcagacttaaggtctttgttaatgttaatgctggaggggtattaatgaggcatgtccaacccccacttcccgtcatggcctgaaccagtctttcaggttaaattttagagtgccctggccaaggaaggagtcgactgagatggctgtggattggtggtggtgggaggcttcaaattttatttttagtttacactagccacatatagttacttagatttacattgattaaaattcaacaaaatttaaaattcaagccaggtgtggtggttcatggctgtaatcccaacattttgggaggccaaggtgggaggattgtttgagcccagaggttcgagaccaacctgggcaacaaagcaagactcctgtctcttactggtggaaggtatctgagttattggcaatgaatctgtatgcatttacagcaacctcaattcttgcctcctcagaagaaagaattcaactgaggggcataaagcagaaaaagagactgaggcaggtttcagagcaggagtggaagtttattaaaaagctttagagcaggaaagaatggaaagtacacttggaagagtcccaagtgggcaacttgaagggcaagtgcagtgtttaaccttggtcctacccctttacagtcttgcctacctccagtgtcgtgtgcctctctcccctgattcttcccttagggtgagctgaccacatgcgcagtgtcctccttacccttgggaagtgagcacatgcagggtgtttaggaagttgtacgcatgcccatctgaggctttgttcccttttcctgtggagtgtgcccctggaaatttttttttttttttttttttttgagacagagtctcgctttgtcacccaggctggagtgcagtggtgcaatctcagctaactgcaagctccacctcccgggttcacgccattctcctgcctcagcctcccaagtagctgggactacaggcacccgccaccacgcccagctaattttttgtatttttagtagagacggggtttcaccgtgttagccaggatggtctcgatctcctgacctcgtgatctgcccgcctcggcctcccaaagtgctgggattacaggcgtgagccaccatgcctggccctgtccccggaaattcatactcctccattttttctcttaatgtgcattccccgggctcactcacccaacacctgagar

SEQ ID NO: 93476 - DNA, 16073 bp, Homo sapiens
  misc_feature (1)...(16073): n = A,T,C or G
ctacacactgacagagacacctttgagtgtggaggcttttctagcaatggttctgtgattaagttgtatctccagccaggggtgggccaactctcctatctttccaagaatcatctcacctttctctgttgtttggatttcttctaacttgatccaaggaaaaagctccttctctggtccctccagggtgcagatgggcttgtgctgcctgtgggtggatattgtgtttaatagttttgccctttccatttctactaccaccttctcctactccactcctcttccccttcaggttcctgaacagagcctcagacctggataagacaatagccttccaccttcaccacactgttcgagtctgctgatacatcagtgcagtatgctgtgtcatccttttgcttagaaacttgcaatgtgttcccactgccttagtctgacattcaaggttcttcacaactagccttttttttttttttttttttttttttttttaagctggagtctcgctctgtcgcccaggctggagtgcagtggcgcgatctcggctcactgcaagctccgcctcctgggttcacgccattctcctgcctcagcctcccgagtagctgggactacaggtacccgccaccacgcctggctaattttttgtaattttagtagagacggggtttcaccgtgttagccaggatgggtctcgatatcctgacctcgtgatccgcccgcctcggcctcccaaagtgctgggattacaggcgtgagccactgcacccggcctacaactagcccttaattccctctccagccacctctctctagtctctggccaaatcccttactttagccaaatcagtccattcatttttcccaaacatctggccctctgccttcacctcctttctcacttgtttaaaaatcccactccaagatctagctcaagtttcacctcctccacaaagctgcctgtgccctctgcaactacaaggacttttatagtttttccccacgttggctcctttagctctgttagcacaactcatttaacacctcccactcattcccttgtattgctatatatcttgtttattcgtgtaatatttaatattaaaaattatttttataacctgagaagtaacatctgagcaggaaaaaaattataaccaaagtaatttctattgtaaaagatccaaacaatacaaaaatatacagagcaacatgtgggacattgcccttactcttctctctcccatgcccaaacgtaaccatcctcagctatttgatgtgcatccttctagttccttttttaaatgtatgtgctgacacatgtttgtggaggggttaaaatataaatgggctcatatcacatctgttattctgctacttgcttttttacttagggtatatatacatttgtcttagagattttctatattagtgtaattagatctccttttaatggcttctcagtatttcatagtataatttcttcaaagtaaaacatactgtctagaatctattatttggaggctatcgtgtagctagtacttagctccagacatgattgcaaccttgaccttgccatcagttagctggctctttgggggagataggaagggaggaatggggcatacacaaataactgcaacaaaaggaaaaatataataatgtccacaagtgtatgcctggagatcctagctaagagaatcaggacttcacagaggaaatgatatttgagcttagcctggagggagcttgacaggtaaaagaagtgtatgagttcaggcacagagatggaaacagaagatgtaggtttgtctgatgccagaccacagtccatgagcaggaagggaatttggctcaattcacaaacatttactgagcattgatgtgtcagacactatactagcaatgaagatttagaaatgagaaacatgaggttcctgtctctaagagggattcagtttaatggaataaaagccaagtttggaaaagcagattagggctggatgacaagctttcagttgtcatgtcaaggagttggaattttattcacgtgggcaatgtgaagccatggtaggctttttagtgggcagatgatgggactgaaactgtagatagcagcagtgtacacagtggtccaaagtagggagaggctagggatcaggggcttattattttttgagacaaggtctctgtcacctaggctggagtgcagtggcgtgatcatggcttactgcagccttgacctcctggacgcaagtgatcctcccaccttagcctcctgagtagctaagaccacaggtgcacaccaccatacctagctaatcgttaaattatttgtagagatagggtcttgccatgttgcccaggctggtcttgaactcctggcctcaagcaatcctcctgcctcagcctcccaaaaatgttgggattacaggtgtgagccaccacaccaagacttttttttttcttttcttaaacaagatagaagtttaaaggccgggcgcggtggctcacgcctgtaatcccagcactttgggaggccgaggcaggtggatcttgaggtcaggagatcgagaccatcctggctaacagtgaaaccccgtctccactaaaaaaaaaaaatacaaaaagttagctgggcgtgatggcgggcgcctgtagtcccagctacttgggaggctgaggcaggagaatggcgtgaacccgggaggcggagcttgcagtgagccgagattgcaccactgcactacagcctgggcaacagagtcagactctgtctcaaaaaaaaaaaaaaaaaaaaaagatagaagtttatttctgcctcagttaaaaggtgtctgggggccgtgcatggtggcttacacctgtgatcccagcactttgggaggctgaggcaggcagatcacttgaggtcaggagttcaacaccggcctggccgacatggtgaaaccccatctttactaaaaatacaaaattagcctggtgtggtggcacacacctgtagtcccagctactctggaggctgaaacaggagaattgcctgaacctgggaggtggaggctgcagtgagccaagatcacagcattacactccagcctgggcaagacagagtgagactttgtctcaaataaatagacaaataataaatacacaaaaattagccagatatgctcgcttgaactcaggaggcggaggttgcagtgagccgagatcataccactgcactccagcctaggcaacagagcgagactcggtcaaaagaaaaaaaaaaaggtgagctgggcgtggtgactgatgcctgtaatcccagcactttaagaagccgaagggggcagatcacttgactccaggagttcgagaccagtctgggcaatatggcgaaaccccatctctacaaaaaatttaaaaattagccgggtgtggtggcatgcctctgtggtcccagctacttgggaggctgaggcaggaaaatcacttgagcccaggaggcagaggttgcagtgagccaagattacacaactatactccagcctggatgacagagacccccatctcaaaaaaaaaaaaaaaaaaaaaaggtatctggcagctggtctgaagataggcatctcaattgttcacggccagttacagattgaactactctttcccccttctcactactgcacttgactagtcttttttttttcccccacaaagaatggggcttcagatagaactgaaaaataaaagtgtctggtggtaggcaatccagagctggcatggtggctctgcaattaacaaggacttatgcttctttttgcttcaccatcctagcgtgcagcttccatcctcatggtcatctcatggtctaatatggcttctagagcttaattcatctcatctacattccagatagcagacagaaggaaggaaagatgattagggggagagagagcagcacagaaggacgctttctagttaactctttaaagggccttcttggaagtccaggacaatacttccaacacttctgtttatgttctcttggccagaacttagtcaactggccatatccagctttaagggagacttggagttttgtggtttttttgtttaacttaaaaaatatcttgatacgtaattcgcaaacagtgaaatgcacagattgtaagtatacagtttgataagttctgacaaatgcatacacccatgtaacccacatccttctgaaaatatagagcatttcatcacccctagaaattccctcctgctgaggggactttttttttttaaacaatacaaatgagagataatgaaggcttcttatcctgaggtgggagggttgtagctatgggaatggaagggaagagctggagagactttggaaggagaatccagagtagacccgttggatgtgggagatgagagaagaacgaatgctggtagcagagccactaacagaaacaggagatagggaggaagtctaggttgttgcaggtggattggaagaatgagtacagttaagactgttggctgggcgcattggctcacgcctgtaatcccagcacttcgggatgctgaggctggcggatcacgaggtcagcagtttgagagcagtctggccaacatggcgaaaccccatctctactaaaaatacaaaaattagccaggcgtggtggtgggtgcctataatcccagctactcgggaggctgagagaaaagaatcgcttgaacccgggaggtggaggttgcagtgagccaagatcgtgccattgcactccagcctgggcgacaagagtgaaactccgtctcaacaaacaacaacaacaaaaacttttaaaaagtgggctgggcgtggtggctcatacctgtaatcccagcactttggaaggccgaggtgggtggatcacttgaggttgggaattcgagaccagcctgacagacatggagaaaccctgtctttactaaaaattcaaaatcagctgggcatggtggcgcatgcctgtagtcccagctactcgggagcagaggttgcggtgagccaagatcgcgccattgcactccagcctgggcaacaggagcaaaactcctccccctcaaaaaaaaaaaaaaaaaaaagaaatctggtggctcacgcctgtaatcctagcactttgagagaccgaggcaggcggatcacctgacatcaggagtttgagaccagcctggccaacatggtgaaaccccttatctactaaaaatacaaaaattagccgggcgtggtggcgggtgtaatcccagctacttgggaggctgaggcaggagaatcgcttgaacctgggaggcggaggttgcagtgagtggagatggcaccactgcactccagcctgggccacagagcgagactccatctcaaaaaaaaaaaaaaaaaaaaaagtgaagtctttacataaatggattacgtgtgctgccctttgagaagtttgttgatgaaaggagaaaggaaatagtagcaccagaggaaaagatcagggatttaccctgttcttacaggataacagctccttgctcttttcagctagcttttcaaaggacagggataggacagccccctgccttatttcggatacttggatctataacctccagaaattcaagctgaagtagctggaggtcggagaggaatgagaactgcctgggtggggtctgccagccagacactgccaggatagccacaaggagacgacttggaagaacagacagcaaccacgttggactcaggcagtcctgggtttgaatcctgtctctgtcaccacctagcctgatgaccttgggcacatcctgagcaccctgtgccttatctgtaaaatggaaacaatcatgccgacctttcagggtggttttgaggattagagactagctcctgacacacagtaggtaatcgtaaatgggtgctattgtttggcccgacccacgttataggacagaacgtctaacggatgcgtcagaacctgcgccctccggatcttggagggtacagagggcgcccctcggcctcctccctttcggaggtggggacaaggtggaggaagggctgcaggaggaggagctctagcatcgcgacccgccccgtcccgtccagtctggcctgggcgccgcgggaacgctgtcctrgctgccgccacccgaacagcctgtcctggtgccccggctccctgccccgcgcccagtcatgaccctgcgcccctcactcctcccgctccatctgctgctgctgctgctgctcagtgcggcggtgtgccgggctgaggctgggctcgaaaccgaaagtcccgtccggaccctccaagtggagaccctggtgaggagatagtcccgaccctcagcccccgtgggccgagccttgttgggtggtaatactggggtctcagcgaacctgggagccgggaggagaggaagtgcgggaactgagttgggggtggtgccgggtctaggggcgagaacgggatctttggaagagcatccgtgacccctgtagtccgatcgtaggtggagcccccagaaccatgtgccgagcccgctgcttttggagacacgcttcacatacactacacggtgaggggtctggggggccggggcggggyctgggagggggcggcgccctgctgaaacacgtcagctttggcttggacacgtggcaagcggttcgggagaagaaactcggggctctggggtcgtcgagcacgtggcgaggggagagacgttgctcttccgtgcctcttttccctccttgcttttctgccagttcctacctggcacggagaagtgcagggtggagagatctccgagaagcgccagccttctggggcttcctgttccttacagcggtaaggggaaygctaggctgccgcactaagggggctgccgccgcccagcggtccaggtgtgtgttgcgcgcctgctgggagggagagggtgctagatgtatgctcttgatgctctctccccccagggaagcttggtagatggacgtattattgacacctccctgaccagagaccctctggttatagaacttggccaaaagcaggtgattccaggtatgtgacctgtgcctcccattccacctcttcccaacctaagccctttcttagcctcttcggctccaaagctgccctggaaatcccccctgaaatgagtaagaccctagggctctacgagttacctcctgaggttcaaacctcacttctagtactccacttgtcccatatcctattggaagccagagatttaagaagtgagggaaaggtcaattgaggatggaggaggaagactttgatcttcatgtcatgggatttggggaaggtggatagcttccagttcagttgtgtcttcttcttcaaggtctggagcagagtcttctcgacatgtgtgtggggtgagtatctcggcaggggtgggcctgggtaccccctttgcatgggtagaggctttctcggccatcctcactccttaagcaggagaatgtggaataaaggaccctgcttcccactggacaggtccaggtcagtgggacctctgagggcattcaragcctctgtgcctcttgcgctgttgcttttgtcgggggagttgaggcacatggggagatggacacctttgctggccagcctgtttggtgttcaggtggaaaaattcgtgttttgggtgtgaagattcagggggttttgctgaaggagcttcagctggactgaggctgctggcctacctctcctgcctctggctgtgactgacattccttccctcagagagaagcgaagggcaatcattccttctcacttggcctatggaaaacggggatttccaccatctgtcccaggtaatctgactaggactctctctcaggccatcaaaatacccagtccctaagagctataaggagctatatactttgtttgatgcttgagaagatccagaccaagtttgtttagacagataggagtggctggggcctccatctacagggccacctttttcctcctcatatcaccaacagggactaaagacaacctgatgaggccacctggcatgacctccagcagccagtaacttgttagggaagagacctgcttgggccacatgggtctgctgcctgtgccaccacctttcccagaacactggacttctttcctgcccttttctacaactctacgctgtgtcagctgtacagccaccccccaccccttcctttcagcctccatcagggaagagacagtaaaaataatcacagtcaagtgattcaaaacaaaacaaaaagcaactgttaaagccaagtctgccccataactttaaaagccatcattggtcactgccgatgtctatttttgaagggttgagatggacagatttcccaagatgcatatcttttgctttcagttctaacaaatgttctattagctaaaatgtgttgtactccacagagtattgggctcgtaattctttttttttttttgagatggagtttcactcttgttgcccaggctggagtgcaatagtgcaatcttcactcaccacaacctccgccacccgggttcaagcaattctcctgtctcagcctcccgagtagctgggattacaggcatgcgccaccacgaccggctaattttatacttttagtagagatggggcttctccatgttggccaggctggtctcaaactcccaacctcaggtgatccgcctgccttggcttcccaaagtgcggggattacaggcatgagccaccgcgcctggctgggctcgttaattcttatcctagttccagcttagaggaaggcctggaaggagggtagggggaccaaggagaaacttttacccaaagccctattacctccccattcccagtgctgcttatttgyacctcttctgcccactcatttctgttccacctgcccctttacttcttaagcagcatcctcatccttcttcctcttcagctcttatgttgaaactcctgttatctcataatcacgttgaatgtgctcattggttggttgattttttaaagtctagtttaaatccatttaatttcagccctgcaaagactctatccgtgtggttatttggaaatacgataaattagtagttagtatagagggttctcccacttacaaatggagaagagcctgtacatttcatattcacagaaagttttcctgcattcaaagacttgtcactggacccaagccacatgtgtagttggggtcaacatgattatcactggactctgctcgtaaatcctcctctactcttgtctaaaggaattcaagcccacatttaaatcttgtcagcttcatagttgttggctttgctgtggcctacgctccctattttcattcagattctgagccctggataaaatgcagagagtctaaccctctccacccctctgcctctccagcggatgcagtggtgcagtatgacgtggagctgattgcactaatccgagccaactactggctaaagctggtgaagggcattttgcctctggtagggatggccatggtgccagccctcctgggcctcattgggtatcacctatacagaaaggccaatagacccaaagtctccaaaaagaagctcaaggaagagaaacgaaacaagagcaaaaagaaataataaataataaattttaaaaaacttatttgcattcttcatctgatattttctgagactgcctttgaaagtgggaatgaggtaaagggctgaggaaaaaagcattgtgaattgcatcttgcctggcatgggggtggttgtaggccctggatcacctcttcccctggcctcctcttgctgtcctaactgactttaaggacctggtcttgagtcttcccataggatctctaggtccttaaggtatgggttttggctctcatggtgccctgattctgaggagggatgcttaattgagcagtgagcctcctggtagttgcctagctgttctctctgttccctgggaccacagtgttcctagtgtcctcaaagagaactgctctgtccaatatggaaaagatataaagagctcataaactccatggaaatttttaatagcaacatccctacatttctcaaaaaaaaaaaaaaatctctaggagttgaaagatttttttccttagatcacaggttgtggaagatcatctgggctgcttcaattatattttaagtggttggatgttgtttatcacctggatgggctatacgtatggacaagggctggagtaagttgctttgatagttgactataaagagtgggttgagctggctcagcacttcgtcactcactgagatgccatccaagtactgcttcagcatctcccgcagcttcccattgatatctagcagctgggctcgtctatgttggaggctcagttgctccagtttcactttgttgyaccttttccagaaattctccattcctatgtagtccaccatcacctgggagtggagttacagggagaaggtgtgcagcgagacccattagcaaatgctgcccaatgccccaccatcccccgggctttaccttggtgagctcctcagtaagctcttctagattattcttctgaatcccctcctgctccttaggagtcaatactgatgaataaaaaggcagcactttttcttcttcggtttcaaatttcctacatatttcagcaagtttaaggatcttttcaccctatttgaagcgggaagagagtttatattaggaaagggagtgaagagggaagctagtggagttggttcccctgtttgaacccagggaagctactcatccaagtgggaaacaatagcaataaatacatatagcaaatggaggttaccatgtaacacacactattccaagtattttcttattgtaaaattgattcatagcctgggaaacatagaaagaccccatctctacaaaaaattatttaaaagccaggcatggtagcacatgcctacagcctcagctactggggaggctgagatggaaggatcacttgagcccaggaggcagaggctggagtgagacgagatggtgccaccannnnnnnnnnnnnnnnnnnnnnnnnnnnnnnnnnnnnnnnnnnnnnnnnnnnnnnnnnnnnnnnnnnnnnnnnnnnnnnnnnnnnnnnnnnnnnnnnnnnnnnnnnnnnnnnnnnnnnnnnnnnnnnnnnnnnnnnnnnnnnnnnnnnnnnnnnnnnnnnnnnnnnnnnnnnnnnnnnnnnnnnnnnnnnnnnnnnnnnnnnnnnnnnnnnnnnnnnnnnnnnnnnnnnnnnnnnnnnnnnnnnnnnnnnnnnnnnnnnnnnnnnnnnnnnnnnnnnnnnnnnnnnnnnnnnnnnnnnnnnnnnnnnnnnnnnnnnnnnnnnnnnnnnnnnnnnnnnnnnnnnnnnnnnnnnnnnnnnnnnnnnnnnnnnnnnnnnnnnnnnnnnnnnnnnnnnnnnnnnnnnnnnnnnnnnnnnnnnnnnnnnnnnnnnnnnnnnnnnnnnnnnnnnnnnnnnnnnnnnnnnnnnnnnnnnnnnnnnnnnnnnnnnnnnnnnnnnnnnnnnnnnnnnnnnnnnnnnnnnnnnnnnnnnnnnnnnnnnnnnnnnnnnnnnnnnnnnnnnnnnnnnnnnnnnnnnnnnnnnnnnnnnnnnnnnnnnnnnnnnnnnnnnnnnnnnnnnnnnnnnnnnnnnnnnnnnnnnnnnnnnnnnnnnnnnnnnnnnnnnnnnnnnnnnnnnnnnnnnnnnnnnnnnnnnnnnnnnnnnnnnnnnnnnnnnnnnnnnnnnnnnnnnnnnnnnnnnnnnnnnnnnnnnnnnnnnnnnnnnnnnnnnnnnnnnnnnnnnnnnnnnnnnnnnnnnnnnnnnnnnnnnnnnnnnnnnnnnnnnncatgagccaccatgcctggccaattcatttcaatttaaaatgtagaccagacgcggtggctcacgcctgtaatcccagcacttagaagccaaagtgggtggatcgctgaggtcaggagttcgagaacgtcctggccaacatggtgaaaccctgtctccactaaaaatacaaaaattagccgggtgtggtggtgcgcacctgtaattccagctactcaggaggctgaggcaggagaattgcttgaactggggaggtaaaggttgcagcgagccaagatcatgccactgcactccagccggggcaacagagtgaataaaacttcgtctcaaaaaaaaaaataattaattaaaatgtaagggggagctcaacgcagtggctcatgcctgtaatcccagcattttagaaagccagggtgggaagatcgtctgaggccaggagtttgacccagcctgggcaacatggcgaaaccccatctctacaaaaaatacaaaagttagctgtgcattggggaggctgtggcgggaggaatgcttgagcccaggaggcagaggttgcagtgagccaagatggtgccactgcactccagcctgggagacagagtgagaccctgtctcaccaaaaagaaaaaaaaaaaaaagtaggaaggggctcaccagggtggctcacgcctctaatcccagcactttgggaggccaaggcaagaggactgcttgaggccaggagttcataaccatcctgggcaacacagtgagaccccatctgtagaaatacataaataaataaattaatttaatttaatgtaagaggggaggaaacatggaataaaaaaggtattccaagtgtccactcagccaggaagcaggaagaagcccccgctatcctttccaaatccctttcactttgcagggaggcaggttccttgactttattctgatagtcctctcccctgtgttaccttatcaacaatctttctcagggccttgagggtggcattactttccagggtgagtctgactaagttcttctgggatgctgcccgggcctgagttctttgggccttaagttttcgcagttgtacaaggaccaattccttgtcattacggatataccggttctcatcttcactctcacggctgtgtatcatgatcttgccttttgaaatagttatggcatcctagaggaacagagtagattaggggaaatctacttgaccaactgagggtcttcagtgagacaggtaaaagggctgcctggggactgaaatcagagcatatcatcttttcccaaccaatgatcagtgatgaggcccaggggaaacaaggggaagcaaaagaggggataatagagcagttaaagcagtgagtatttccaggtggctacactaacctgtagtttctgtatttttttcatctgtacttcaatctctttggagctcttctcatccttcacctgcagggtctcaaaggcagcctttcgatcctctgtggcatcagtgtaattcttgagtacatcctggaactttctccacagatcttctactctgttctccaggtgcagtcttagaaagtgcttctcttctaaattctagcaagtgaccccaaaatagcaaatgtttggaattaccttattagtgccctttcacttctaccagcaatcccaccctcttgaactgtttgtagcatagtttagtacagaggtctcccatgaaaatgcctacacaagaccaggcagatgatataaatatgttttgtgggccgggtggggcctgtggtgaactggagaggaaatgctgcatttgggaggaggaggggcagtcactgagctccacgtgagccttgccatttggaaatgtggcccagtgttgccagatctttaaatttttcaagggaagctgaaaatttggatgtttttgtgaaatctccaatttttaagtgtaggatgcttattcaaaaaattgtataaaacactgtggggtaaataaaaacaaagaactccatacccaaacctaggtctgtgggctggctaagattgcaacctcgaggacagtggaaagcactttggatcaaggggcaggagacctagattctcctgattctaccacaaaccagcagcatgactttggcaggtcattttacttacttgtgccttactttcttcatctgaaaatcacaggggtgaagccagatgatctccttggtgctttttagctctaaaatgcattcccttgacaatttagaatggtcctccctcccaaccaattttcacaaaattacaaaaagcattagggatacctacagggggcaatagatgttttattgactgtgttggctaaaggggtctcttctacttctagtagccttgagcatttttctttttttctttttttaatttttttgagacagggtctcgctctgtcacccaggctggagggcagtgttgctatcacagttcactacagcctccatcttctgggctcaagcgatcatcctacctcagcctcttaagtagcttggaccataggcacacactaccacgcctggctattttctttcttttttgggggggccggtagagatggggggggactccctatgttgcccaggctagtcttgaactcccagtctcaagtgatcctcctgccttggcctaccaaggtgctgggattacaggtgtgagccactgtgcccagcctccttgagcatttttctatcacctcctcccacttcttgcctatctactctccctccgtaccatgtttttgagatcattccacatgctctggaactccagcttgctttcatactcagaatctatatagttctgctccatggccatgaagatatcttgcagatagtgaatctctttctcatgttggtcaataattgtcttcctgtaggagacaagacactgtccctgctctgagggatacaggatattgaccaataatgacaattcaaagcagtatgtaatctatgtgaatggtacaaactcttaggtactgatggagaaaagagagagggaaggctttactctttttagggctagaaagaatgagtaaggttattttattttgatttctgaatgggtaatacattcatgtgatacaaaaaaagtacaaaaggttacagtgagaagtctctctcccatccctgttccctgccaaatgggtaggattttgatagttgaaagtgggtagttggtccctctccctctccctctccctctccccatggtctccctctccccatggtctccctctccctctctttccacggtctccctctcatgccgagccgaagctggactatactgctgccatctcggctcactgcaacctccctgcctgattctcctgcctcagcctgccgagtgcctgcgattgcaggcgcgcgcctccacgcctgactggttttcgtatttttttggtggagacggggtttcgctgtgttggccgggctggtctccagctcctaaccgcgagtgatccgccagcctcggcctcccgaggtgccgggattgcagacggagtctggttcactcagtgctcaatggcgcccaggctggagtgcagtggcgtgatctcggctcgctacaacctccacctcccagccgcctgccttggcctcccgaagtgccgagattgcagcctctgcccggccgccaccccgtctgggaagtgaggagcgtctctgcctggccgcccatcgtctgggatgtgaggagcccctctgcctggctgcccagtctggaaagtgaggagcgtctctgcctggccgccatcccatctgggaagtgaggagcgcctcttcccggccgccatcacatctaggaagtgaggagcgtctctgcccggccgcccatcgtctgggatgtggggagtgcctctgccccgccgccctgtctgggatgtgaggagcgcctctgcccggccgccaccccgtctgggaggtgaggagcgtctctgcccagccgccccgtctgagaagtgaggagaccctccgcccggcagctgccccgtctgagaagtgaggagcctctccgcccggcagccaccccgtccgggagggaggtgggggggtcagccccccgcccggccagccgccccatccgggaggtgaggggtgcctctgcccggccgcccctactgggaagtgaggagcccctctgcccggccgcccctactgggaagtgaggagcccctctgcc

SEQ ID NO: 93477 - DNA, 44322 bp, Homo sapiens
tgatgctccccactctttgtccaaatgatctcattgttcaattcccacctatgagtgagaacatgtggtgtttggttttccatccctgtgatagtttgctgagattgatggtttctggcttcatccatgtccctgcaaaggacatgaactcatccttttttatggctgcatagtattccatggtgtatatgtgccacattttctttatccagtctatcattgctggacatttgggttagttccaagtctttgctattgtgaatagtgccgcaataaacatgtatgcatgtgtctttataatagcatgatttataatcctttgggtatatacccagtaatgggattgctgggtcaaatggtaattctggttctagatccttgaggaatcgccacactgtcttccacaatggttgaactaatttacacttccaccaacagtgtaaaagcattcctatttgtccacatcctctccagcatctgttgtttcctgactttttaatgattgccattctaactggtgtgagatggtatctcattgtagttgtgatttgcatttctctgatgaccagtgatgatgagaactttttcatgtgtctgatggctgcatagatatcttcttttgtgaagtgtctgttcatatcctttgcccactttttaatgggattgtttgttttttttcttgtaaatctgtttgagttctttgtagattctggatcttagccctttgtcagatggatagattgcaaaaattttctgccatgctgtaggttgcctgttcactctgatggtagtttattttgccatgcagaagctctttagtttaattagatcccatttgtctattttggcttttgttgccattgcttttggtgttttagtcatgtagtctttgcccatgcctatggcttgaatggtattgcctaggttttcttctagggtttttatggctttaggtctaacatttaacctttaatccatcttgatttaatttttgtataaggtataaggaagggatccagtttcagctttctacatatggctagccagttttcccagcaccatttattaaatagggaatcctttccccattgcttgtttttgtcaggtttgtcaaagatcagatgggtatagatgtgtggtgttatttctagggcctctgttctgttccattggtctatatatctgttttggtaccagtaccatgctgttttggttactgtagccttgtagtatagtttgaagtcaggtagtgtgatacctccagctttgttctttttgcttaggattgtcttggcaatgtgggctcttttttggttccatatgaactttaaagtagttttttccaattctttgaagaaagtcattggtagcttgatggggatggcattgaatctataaattactttgggcagtacggccattttcacggtattgattcttcctatgcatgagcatggaatattcttccatttgtttgtgtcctcttttatttcattgagcagtggtttgtagttctccttgaagaggtccttcacatcccttgtaaattggattcctaggtattttattctctttgtagcaattgtgaatgggagttcactcatgatttggctctctgtttgtctgttaatggtgtacaggaatgcttgtgatttttgcacattgattttgtgtcctgagaccttgctgaagttgcttatcagcttaaggagattttgggctgagacgatggggttttctaaatatacaatcatgtcatctacaaacagggacaacttgacttcctcatttcctaattgaatatcctttatttctttctctttcctggttgtcctggccagaacttccaacactatgttgaataggagtggtgagagagggcatccttgtcttgtgctggttttcaacaggaatgcttccagcttttgcccattcagtatgatattggctgtgggtttgtcataaatagctcttattattttgagatatgttccctcaatacctaatttattgagagtttttagcatgaagggctgttgaattttgtcgaaggccttttctacatatattgagataatcatatggtttttgtcattggttctgtttatgtgatggttatgtttattgatttgtgtatgttgaacaagccttgcgtcccagggatgaagccaacttgatccgtgatggataagctttttgatgtgctgctggattcggtttgccagtattttattgaggatttttgcatcaattttcatcagggatattggtttctaaaattctcttttctgtgtgtgtatctctgccagtctttggtatcaggatgatgttggcctcatagaatgagttagagaggattccctctttttctattgtttggaatagtttcagaaggaatggtaccagctcatcttagtacctttggtagaattcggctgtgaatctgtctggtcctggacttttttttggttggtaggctattaattactgcctcaatttcagagcctgttattggtctattcagagattcaacttcttcctggtttagtcttgggagggtgtatatgtccaggaatttatccatttcttctagattttttagtttatttgcatagaggtgtttatggtattcactgatggtagtttgtattttgtaggaccagtggtgatatcccgtttatcattttttattgcatctgtgtgattcttctctcttttcttctttattaatcttgctagcagtctatcgattttgttgatcttttcaaaaaaccagctcctggattcattgatttttttgaaggatttttttgtgtgtctgtatctctttcagttctgctctgatcttagttatttctggccttctgctagcttttgaatgtgtttgctcttgcttctctagttcttttaattgtgatgttagggtgatgattttagatctttcctgctttctgttgtgggcatttagtgctataaatttccctctacacactgctttaaatgtgtcccagagattctgatacatgttgtctttattctcattggtttaaaagaacatctttattcctgccttcattttgttattcacccagtagtcatttaggagaaagttgttcagtttccatgtagtagtgcggtttggagtgagtttcttaatcctgagttctaatttgattgcactgtggtctgagagacagtttgttgtgatttctgttcttttacatttgctgaggagtgctttacttccaattatgtggtcaattttagaataagtgcgatgtggtgctgagaagaatgtatattctgttgatttcgggtggagagttctgtagatgtctattaggtctgcttgttgcagagctgagttcaggtcctggatatccttgttaaccttctgtcatgttgatctgtctaatattgacagtgtggtgttaaagtctcccattattattgtgtgggagtctaagtctctttgtaggtctctaaggacttgctttatgaatctgggtgctcctgtattggatgcatatatatttaggatagttagctcttcttgtggaattgatccctttaccattatgtaatggcgttctttgtctcttttgatctttgttggtttaaagtctgtttttgcagagactaggattgcaactcctgccttttttttgttttccttttgcttggtagatcctcctccatccctttattttgagcctatgtgtgtctttgcacgtgagatgggtctcctgaatacagcatactgatgggtcttgactatttatccaatttgccagtctgtgtcttttaattggggcatttagtctatttacatttaaggttaatattgttatgagtgaatttgagcctgtcattatgatgttagcttgttattttgcccgttgattgatgcagtttcttcatagcatcgatggtctttacaatttggcatgtttttgcagtggctggtgccggttgtttctttccatgtttagtgcttccttcaggagttcttgtaaggcaggcctggtcctgacaaaatctcccagcatttgcttgtctgtaaagtattttatttctccttcacttatgaagcttagtttggctggatatgaaattctgggttgaaaattcttttctttaagaatgttgaatattggcctccactctcttctggcttgtagcatttctgctgaaagatctgctgttagtctaatgggcttccctttgttggtaactcgacctttctctctggctgctcttaacactttttccttcatttcaaccttggtgaatctgacaattatgtgtcttggggttgctcttctcgaggagtatctgtgctgttctctgtatttcctgaatttgaatgttggcctgccttgctgtgttggggaagttctcctggataatatcccgaagactgttttccaacttggttccattctccccatcactttcaggtataccaatcaaacatacatttggtcttttcacatagtcccatatttcttggaggctttttcatttctttttattctttttctgtaaccttgtctccttgctttatttcactaatttgatcttcaatcactgataccctttcttccgcttgatcgaattggctattgaatcttgtgcatccgtcatgaagttcttgtgccatggttttcagctccatcaggtcatttaaggtcttctccacactgtttattctagttagccattcatctaatcttttttcaaggtttttagcttccttgcaatggattcaaacacccttctttagctcagagaagtttgttattactgaccttctgaaacctacttctgtcaactcatcaaagttattctccatccagctttgttccattgctggtgaggagctgcgatcctttggaggagaaaaggcattctgatttttagaattttcagcttttctgctctggtttctccccatctttgtggttatatctacctttggtctttgatgttggtgacctacagatggggttttggtgtagatgacctttttgttgatgttgatgctattcctttctttttgttttccttctaacagtcaggtccctcagctgcaggtctgttggagtttgctggaggtccattccagaccttgtttacctgggtatcaccagcggaggctgcagaaccgcaagtattgcagaagagcaaatattgctgaacaacaaatattgctgcctgatcctttctctggaagcttcgtcccagaggggcagccgcctatatgagttgtctgtccacctctactgggaggtgtctcccagataggctacacgggcatcagggactcacttgaggaggcaatctgtcctttctcagagctcaaacgcggtgctgggagaaccactgctctcttcagagctgtcagacagagacgtttaagtctgcagaagttgtctgctgcctttttttgagctatgtcctgcccacagagatggagtctagaggcagtaggccttgttgagctgtggtgggctccacccagttcgagtttcctagctgctttgtttacctactcaagcctcagcaatggcggacacccctccctcagccaggctgctgcctcacagttcaatctcagactgctgtgctaggagtgagcaaggctctgtgggcgtgggacccaccgagccaggcacgggaatcaccttgtctactggttgctaagtccttgggaaaagcactattttggtgggagtgtcctgtttttccaggtagtctgtcacggcttaccttagctaggaaagggaaatcccccaatctcttacacttcctgggtgaggcgatgcccccgcctgcttcagctcgccctccttggactgcacccactgtccaaccagtcccagtgagatgaaccaggtacctcagttggaaatgcagaaatcacccgtcttctgcgtcgatcatgctgggagttgcagactggagctgttcctatttggccatcttccagtttcaatagttctttattttatttatgctatctatttcttttccttttttttttttttttttttttttgagatgaagtcttactctgttgcccaggctagagtgtagtggtgtgatctcggctcactgcaaccactgcctcctgggttcaagtgattctcctgacttaacctcctgagtagctgggactacaagagcatgccatcatgcccagctaatttttgtatttttagtagagatggggtttcaccatattggccagaatggttttgcattcctgacctcaagtgatctgcctgcctcagcctcccaaaatgttgggttacaggggtgagccaccgtgccttgctatttatgccatctatttcactgaagattccgcctctcatttcttgagtcattttttttaaatttccttaaattggacttcacatttttctgatgcctccttgtttagcttaataactgaccttctgaattcttttttaggaaaatcaggaatttcttcttggtttggagccattgctggtgagctagtgtaattttttgggggggatgttaaagaaagttgttttgtcatattaccagaattgtttttctggttccttctcacttgggtaggctatgtcagagggatggtatagggctcaaggctgctattcagattttttgacccacggggtgttctcttgctgtagtattctcccccttttcctatggatgtggtttccagagagctgagyggtagtgattgttatctctcttctgtatctagccacctagctggtctgccaggcttcaggctggcactgagggttgtctgcacasagtcctgtgatgtaaaccatctgcaggtctstcagccatggataccagcacctgctctggtggaggtggcagcagggtggaatggactctgtgaaggtccttagttttggttgcttaatgcactatttttgtattggcctcctgccaggaggtggcactttgaagagagcatcagctgtagtagcataggggcatcaggcagtgggcagggccctagaattcccaaaagtatatgccctttgtcttcagctgccagggtgggtagggaaggaccatcaggggggcagggctaggcatgtgtgagttcagactctccttgggttggtcttggtggcagctgctgtggtggatgggggtgttgttcccaggccaatggtgttatattcccaggaggattagggttgcctctgctgtgtcatgcaggttgtcaggggagtgagggaaagctggcagtcacaggcctcacccagctctcatacaacccaaaaggccagtctcactcccaccttgccctctcaaacagcaccgagtctgtttccaagcagtgggcaagcaagactgagaacttgccccagactaccagcctcctagctgtgaaagcaaacggggctttcctgcctccctgcctgtggagtctgcataccagattcacaccctcccctgaggtctggacaggaaacttcaggttctgttggaattgttacaaagttcagctggaggtttccttttccctgtggtcttttccaaatacctctggcagccctccccaaggactcctatgagacaaggcagaaatagcttcccaggggactcagagagtccacagggcttttcttgctgcttcctctatccctgtatttcactcagctctctgaatcgacccagcttaaggtaaggtcagaatcttctcccatgatctagaccttcaggttccccattgagggtgtgtgtttggggcagacaatctccatttcccacttccacagcttgggctctatttggggtgtctcctgggtcctctaggagcattccgcttccttcagatggtctgtgagtgctctcagctttcctggttaatttctgcagtagttctggagcaaaagttcacaacgtgagtctccatacattgctctgtctgtccacgtgagagctgcagtctagtcctgcctcttgtctgccatgatttcctagaataactttctactatggtttttgtttgtttttgtctttctacttttaaaaaatttctgagatatacttttagttgttttcagtctttgagtcatgttatcccttttcattttcagctttatagtgtattttttctaatcctaggtgctgaaaatgacacagtaaataaatacacatgttcagctcaccatcttgagccattagttctagtaaattcatgttgtatttactcaggatgatacctaatactctattcaacgattccattatcattaagaatagcacattaggatctatttttttaataatacatgctttaggcctggagcggtggtttacgcctgtaatcccagcactttgggaggcccagtcaggtggatcacaagatcaggagatcaagaccatcctggctaacacggtgaaaccccgtctctactgaaaatacaaaaaaattagctgggtatggtggcatacgcctgtagtcccagctacttgggaggctgagacaggagaatcacttgaacctggcaggtggaggttgccgtgagctgagattgttccactccactctagcctagataacgaagtgagactccgtctaaaataataataataataatacatgctttagtacacaaagcacttgacccccttttttctctttattctggaagtcttacatatacagttttcttttcttccttattttccagctaaagagtcaaagttttctttcttccatcttaagttagtgaatttaaactgggtattttcagaaagcaatggtcatgtatactaagatgcttttaagagaactgactttggttataaagagatttaatgcaagcctccagtttaacttggaggactgagtcacccctgtaataacatgtttgtctgaaccacgcacaggacatcctttgccattcaacctctgatttgcacaaggtgactaaaggaccagcagcaaacaaaagcaaaggtaaaatagacttttttttcctgtttgtaaaaattttaaaaattgtttttagaaatttgaggagttagaaaaaagccaatattaatttcttggaatactcaatttcttttgcagcctaactttacttaattttcaaatgcattaccttttgaaatatgagtttgtttttatgaaccaagcagcctaaaatacacatttgtcactgatagttacgagctaaatttcagttaactttttatttattataaatctacatttgaaaataattcccactttaatgactactcaaggctttcttcatttttcttgtgcacatagtttctgtgattgcattactaaccttaacttgtgatagcatcaaaatgtattccatgaagcaggttagtaaattaactacaaacaagccataggaacacatgacttcatgagacagccacaactttaatattcttttgaatcaatagatgtaaagcactcctcaagctaactttataaacataaatgttttccattagagtattagtgcgtattttgacaaagattttacttttgcaccatctttaatgaaacatgtttttcatacctaattttatagttwtacttaccatgatggtcaatacaagaggactgtttgttggaataagtattgcagattttaggaagcatgcaacatttaaaagggctcagaaagtggatgatttttggttgtaaaactgggtcgtacattttctttccaaatattgttaaagtgactgaatatttagagataacartcatctgacatttcaaaaaagaaaaatcttagtaattggggagaggataaataaataaacatatacatatatgtacatatggatagatttagattttccagaaaagaaggaacaagtaccaaaacagtataaggaaggtaaatcttaaatcattcaacctgttaaagagaaatcttaaagttgagaaatttaataatgatggggaaaatgctgtttactttagtgactatgtatgtgactgtatgtatgtatataaagtgaaaatttgaaaaattatgagataataaaacttgttatctctagatcctggagtacctgaataactaatgtacagtctctctctctctctctctccctctctctctctctttctctttctctctctctttgagacagggtctctctgtcacccaagctggagtgcatcggcgcgatcttggctcactgcaacttctgcctcctgggttcaagtgattcttctgcctcagcctcctaagtagctgggattacaggcacccaccaccacgtctggctaatttttgtattttttggtacagacagggtttcatcatattggccaggctggtcttgaactcctggcctcaagtgattggaccattttggcctcccaaagtgctaggattacaggtgtgagccactgcaactggcccaggctttcttttttaaaacaatatacataaacaaacaaaagagaaaccttttaagacaaaatttttgttccttcatagacatgctgacttgaatcatcttcataatacttggttctctgcagggtatggtggagcgtgcctgtagtcccagctactcaggaggctgaggcaggagaattgcttgaacacaggaggcggagattgcagtggaccgagatcgcatcactgcattccagcctgaacgatggagccagactctctcacaaataacaaaaaacttgattctctatttcacctgtttatacaaaactttctatatttctatgtagaaacatgtttctatatttctcatatgttttatcttacatagtagcatgcaaccctcttacataccaatcaggtagaattagagtgacactggatttacctgtttgtttcaaagctttgggaattcttccaataagtgtgacacatgttagaatcattgttacttgagatacttattgtactgataaatgcaatacaattgtagcaatagctaagaaagcttagtcacacgatttatttcagccttgcttgtaaattagaattcagtttgaggatggaaagaagagctcttgttgaaatatgaatacttaratttttgttgctgttgttgagacagggtctcactctgtcactcaggatggagtgcagtggcatgatcactgctcactgcagccttgaactcctgggctcagatgatcctcccacttcagcctcctgagtatctggaaccacaggaacgcaccaccagccggctaattttttgtattttttgtaaagacagggttttgccatgttgctcaagctggtctctaactcttgggctcaagcggtcctcctcctcggcctcccaaagtactgggattacagtcttgagccaccgtgcgactctacttataatagaattacagatactgtgaatttctaacaagaacaacctgtagttgttttgttcacagaccgaagtctctttacctaagtactaagcatgggcctaatgttcataataggcccaaatgcatgaatcctgtgctctgtcttatcatgaatatgtgaaaaatctaaatctcattcttcgaggagcaatatttctttgatacactatattgggtggttgaagaactggctacaatcctaggctggagttcctcctgcctttgtcaagagaattccagaaygaccttattgcatccttagtctaacccaaaatctatgattggaacatttccaaatttccttattgtattaggaaattctctcaagattacatctggaaatcaaaatctattgtgaaacattttgaagttataaggtttgtgtaattagactgcatgcaattagcagtcttggacaaataaacttatttttaaagaattaaaaaatatttgtatgaaaaagtatttcttcacatttatggttaatgtatgttgctatgaattaatgtaggaacgcaacttactttactaagatccaagtgcaacacagttctcacaccatgtgaatgggaaaccaaagtagacaacaaattatttaatgatcttttaaaaaatacatgcaaattaatgattagttaaatattacatttgatgtttcaacaaagtttttttaaattatactttaagttctgggatacatctgcagaatgtrtgggtttgttacgtagctatacatgtgtcatggtggtctgctgcaccaatccacctgtcatctacattaggtatttctcccaatgctgtccctcccctagccctctgccccctgacagcccgtgtgtgtgatgttcccctccctgtgtccatgtgttctcattgttcgactcccacttacgagtgagaacatgcggtgtttggttttctcttcctgtgttagtgtgctgagaatgatggtttctagcttcattcatgtccccgcaaaggacatgaactcattcttttttatggctgcatagtattccatggtgtatatgtgccacattttcttgatccagtctatcattgatgggcatttgggttgtttccaagtctctgctgttgtgaatagtgctgcagtgaacacttgtggatgtgtctttatagtagaatgatttataatcctttaggtatacacccagtaatgggattgctgggtcaagtggtatttctggttctagatccttgaggaattgccacactgtcttccacagtggttcaactaatttacattcccaccaacagtgtaaaagcgttcctatttctccacattctctgaagcatctgttgtttcctgactttttaatgattgccatcctaactggtgtgagatggtatctcattgtagttttgatttgcatttctctaatgaccagtgatgatgagctttttttcatctttgttggccacataaatgtcaccttttgagaagtttctgattatatcagttgcccactttttgatggggttgtttgtttttatcttataaatttgttaagttccttgtagattctggatattaaccttttgtcagatgggtagattgcaaaaattttctctcattctgtaggttgcctgttcactctgatgatagtttcttttgctgtgcagaaggtctttagtttaattagatcccatttgtcaattttggcttttgttgccattgcttttggtgtttcagccatgaagtcttttcccatgcctatgtcctgaatggtaatgcctaggttttcttctagggtttttatggttttaggtcttaggtttaagtctttaatccatcttgagttattttttgtataaggtgtaaggaaggggtctagtttcagttttctgcatatggctagccagttttcccagcaccatttattaaatagggaatccttttccccttgcttgtttttgtcaggtttgtcaaaaattagatggttgtacatgtggtgttatttctgaggcctctgttctcttccattggtctatatatttgttttggtaccagtaccatgctgttttggttactgtagccttatagtatagtttgaagtcaggtagtgtgatgcctccagctttgttctttttgcttaggattgtcttggctatacaggctcttttttggttccatatgaaatttaaagtagttttttctacttctgtgaagaaagtcaatagtaacttgatgggaatagcattgaatctataaattaccttgggcagtatggccattttcatgatattgattcttcttttccacaagcatggaatatttttccatttgtttgtgtcctcccttatttccttgacagtggtttgtagttctccttgaagaggtccttcacatcctttgtaaattggattcctaggtattttattctctttgtagcaattgtgaataggagttcattcatgatttggctctccgttggtctatcattggtgtataggaatgcttgtggtttttgcacattgattttgtatcctgagactttgcttaagttgcttatcagcttaaggagattttggactgagatgatggggttttctatacagtcatgtcacctgcaaacagagacaatttgacttcctctcttcctatgtgaatgctctttatttctttctcttgcctgattgccctagccagaacttccaatactgtgttgaataggagtggtaagagagggcatcctagtcttgtgctgcttttcaaagggaatgcttccagcttttgcccattcagtatgatattggctgtgggtttgtcataaatagctcttattrtwttgagatacattccattaataccagtttattgtttttagcatgaagaggtgttgaattttattgaaggccttttcggcatctattgagataatcatgtggtttttgtcattggttctgttgatgtatggattacgtttattgatttgcatatgttgaaccactcttgcatctcagggatgaagccaacttgattgtggtagataggctttttgatgtgctgctggattcagtttgccagtattttattgagagtttttgcatctatgttcatcagggatattggcctgaaatttgttgttgttgttgtgtctctggcaggttttgatatcaggatgatgctggcctcataaaatgagttagggaggattccctgtttttctatggtttggaataatttctgaaggaatggtaccagctcctctttgtacctctggtagaattcggatgtgaatccttctggtcctgggctttttttggttggtaggctagtaatttctgcctcaatttcagaacttgttattagtctattcagggatttgacttcttcctggtttagtcttgggagggtgtatgtttccaggaatgtatctgtttcttctagatttctactttatttgcatagaggtgtttatagtattttctgatggtagtttgtatttctgtgggatcagtggtgatactccctttatcattttttattgtgtctatttgattcttctctcttttcttctttattastctggctagcagtctattttgctaaccttttcaaagaaccagctcttggattcattgtgtttttgaaaggtttttcatgtctctatttccttcagttctgttctggtcttaattatttcttgtcttcttctagcttttgaatttgtttgttcttgtttctctagttcttttaattgtgatgttagggtgtcggttttagatccttactgtttctgatgtgggcatttagtgctataaatttccctctaaacactgctttcactgtgtcccagagatctggtacattgtgtctttgttctcattggtttcaaagaacttatttatttctgccttcatttcattatttacccagaattcattcaggaggaggttgttcagttcccacgtagttgtgtggtttkgaatgagtttcttaatcctgagttctaatttgattggactgtggtctgagagactgtttcttatgatttatgttcttttgcatttgctgaggaatgttttacttccaattatgtggtcaatttaagaataagtgctatgtggtactgagaagaatgtatattctgttgattttgggtggagagttttgtagatgtctattaggtctacttggtccagagctgagtttaagtccagaatatccttgttaattttctgtctcgttgatctgtctaatattgacagaggggtgttaaagtatcccactattattgtgtgggagtctatgtctctttgtaagtctctaagaatttgctttatgaatctgggtgctcctgtattgggtgcatatatatttaggacagttagctcttcttgttgaattgatccctttaccattatgtaatggccttccttgtctcttttgatctttgttggtttaaagtctgttttatcagagactaggaatgcaacccctgccktttttgcttattcctccattcctttattttgaacttatatgtgtctttacacgtgtgatggttctcctgaatacagcacaccaatgggacttgactcttcatccaatttgccaggctgtgttttttaattggggaatttagcttgtttacatttaaggttaatatttttatgtgtgaatttgatcctgttattatgatgctagctggttattttgcccactggtcaatgcattttcttcacagtgttgatggtctttacattttggtatgtttttgcagtggcgggtaccatttttcctttccatacgttttgcttccttcaggagctcttgtaaggcaggcctgatggtaacaaaatccctcagcgtttgcttgttttaaaggattttatttctccttctctttgaagcttagttgggctggatataaaattctgggttgaaaattcttttcttaagaatgttgatattggcccccactttcttctggcttgtagggtttctgccaagagatctactgttagtctgatggacttccctttgtgggtaacctgacctttctctctggctgcccttaacattttttccttcattttaaccttgggtaatctgacaattktgtgtcttggggttgctcttctcgaggagtatctttgtggtggtttctgtatttcctgaatttgaatgttggcctgccttgcttggttggggaagttctcctggataatatcctgaagtgtgttttccagcttggttcccttctccccatcactttcaggtaaaccaatcaaacataggtttggtcttttcacatagtcccatatttgttggaggctttgtttgttccttttcattcttttttctctaatcttgtcttcacactttatttcattcagttgatcttcaatctctgatatcctttcttctgcttgattgatttggctattgatacttgtgtatgcttcatgaagttcttgtgctgtgtttttcagctccatcaagtcatttatgttcttctctaaacttgttatcctacttagcagttcctgtaaccttttatcaaggttcttaggttccttgcattagattagaacatgctcttttagctcagaggagtttgttattacccaccttctgaagcctacttctgtcagttcatcagccttactctccatccagttttgttcccttgctggtgagaagttgttatactttggaggcattttggtttttgtaattttcagcatttttgcactggtttttcctcatcttcatggatttatctacctgtgatctttgatgttggtgacctttggatggggtttttgcatgggtgtcctttttgttgatgttgatgttattgctttctgtgttttagttttccttctaacagtcaggtccctcttctgcaggtctgctggagtttcctggaggtccactccagaccctgtttgcctggtatcactaggaggctgcagaacagcaaagattgctgcctgctccttcctctggaagctttatcccaaagggcacctgccagatgccagccagagctctcctgtatgtctgctgacccctgctgggagctgtccctgttaggaggcatgggggtgagggacccattcgaggaggcagtctgtcccttagcagagcttgatcactgtgctgggagatccactgctctcttcagagccagcaggcaggaacatttaagtctgctgaagctgtgcccacagccaccccttcccctagttgctctgtcctagggcaatgggagttttatctataagcccctgactggggctgctgcctttctttcagtgatgccctgcccagagaggaggaatctagagaggcagtttggctacagtggctttgccgagctgtggtggattccacccatttcgaacttcccagtggctttgtttacactttgaggggaaaaccgcctactcaagcctgggtaatggtggacgcccctccctcaccaagctcgagcatcccaggttgacttcagattgctgtgctggcagcaagaatttcaagccaatggatcttagcttgctgggctccgtggaggtgggatccgttgagttagaccacttggctccctgtcttcaccccctttccaggggagtgaatggttctgtctcattggtgttccaggtgccactggggtacaaaaaaacctcctggagctagcttggtgtctgctgaaatggctgccagttttgtgcttgaaacccaggaccctgatagtgtaggcacctgagggaatctcctggtctgcaggttgcgaagaccatgggaaaagcatagcagctgggctggatagcactgtctctcaccacacagtccctcatggcttcccttgggtaggggagggaattctccaaccccttgtgcttcctaagtgaggtgatgccccaccctgcttctgcttgccctccatgggttgaacccactgtctaaccagtcccaatgagatgagccaggtacttcagttggaaatgcagaaatcaccctcattctgcattgatctcactgggagctgcagaccagagctgttgctattgggccatcttgccagctgcctttctttgtttctttctttgtttctttctttgtttctttstttctttctttstttctttctttstttctttctttctttctttctttctttctttmaatagaaacaaaacataattcagttggtcacataacatatactatttgttatttaaacctggtaatgatcaggctgattggcacaattcagttgcaacatcaagaacatcatcatttatccagaaggtgtacttgaagtggaaaactaggctcttaaatggagatatggaatgtctatgtagatcaagtgtggtggctcactcctgtaatcccagcactttgggaggctgaggcaagtggatcacttgagctcaggagttcgagaccagcctgggcaacatggtaaaaccctgtctctgccaaaatataaaaattaactttggcatggtggcacacacttgtagtcccagctactcaggaggctgaggtgggagaattgcttgagcccaggaggtmgaggttgtagtgagctgatattgtgccactacacttcagcctatctctatctcaaaaacaaacaaacaaaagaaatgtatgtgtagcaaccatgtaagatgtaaaccaaaaagtgaagaaaattatatacagacataatccaaccagctctttataagccaaaatctactcagattgcttaatttgatgggcttgaaatctcatagtcaagtttaacgaagattgacagagatattttaggtagaaaacattaggtgcaatgccaaaaggcgttacaaactcaggcatgacttaatcaaatatgtggtagtcagcacatagtggacataagacgtccattgagccatatggtaggattgctgtctaggttagaagatctgtcttatgtgaaaatgtcaaacagagaaaggcaagagtgcagagaggaatggggaaagggtagtgtgcaagatcctctcccatatttataaattagaatttaagttctagttcataaatataattttcaaaagttgagactttagttgataagaacagaatagacatcaatactatgtttagatatacaacatgccattactattatcattgcactcctctgcccctaaagacagtattgtgatattctgggaaggcaagttaaaacaatagaaataaaaattgaataggaaaaataatgaaacttcttctagtgtgctgtttatggtaactggctccagagtgtaagattttaacctgcactcttactgacttctgttatattgcactgaggtattttgtgttgtaaacacaccagggtagttggacgtaattcaaagaaagcaatcagatttgagaaggatttagaaaagtgtggggaagaataaaaagaaataaaaacaatgccatagacattgaagaataaaaaataaggtcagaagttagtcttcatcaaaaaggtatgggtgatgaaataaaatggaattgaagaaaatccaaggaaaaaagttatctgatgctgaagaagttaacaagcaatctagcttcctgagttatttaaaattaggctgaataaatcaccaaaactaatatatagtcaaagataaaaaagaaagaacaatcattttttcatatccaatttctccacatacttttatctgttgtaactagagttttgccttgtttacaatcagagaaggcctattactgtaaagtatatttttccactagtattaaataattcaccggtattgtgcattacattttgtggagaataataatactaatcagtttcttcaagcttatcatcagtgttcctaccgaacacctcctaaaccattaaccactgttaattttcttttaccatagatagtaacyaatcaataattagcttttaataatcaaatgtcagaatagagccttaacttaaagctctggctgatagtgttcatttccattaaaaaaaatcattcttatttcctgaaaagggatgttcttgtcagattgcagatgagcatacaatttctcaaataaaattataaaaatgatcttcataacaaaatgcaagtgagatgtaactttctttaggaaaacttgattccttatactgtagtcagaatcgatttgcatcttctcttatatatccaaagaactttgagtttttaaaatcagattgatggttttgagttagctgttacagcaacatattacaaaattccaacagaacttccttctcaaataaatctcacccatgctcacttctctcacttagccaccctgttctcttccctggaagcaagcaatataaccttttttgagtatccctcctgatatggtttggctctgtatccccacccaaatctcatctcaaattatcatcccatatgttgygggagggacctgtaatccccatgtgtggagggagggaagtgatcagattatgcaagcagtttcccccatgctgttctcctgataatgcatgagttctcacaagatctgatggttttataagtgtttggaagttcctccttcataacacttctctttcctgccaccttgtgaagaaggcacttaatttccctttgccttctgccatgattgtaagtttcctgaggcttcccctgccatagggaactgtgagtaaattaaacctctttcctttataaattacccagtctcaggtatttccttatagcagtgtgagaacagactaatatagctccagagatattcctcagtacacaaattattatactgtgtacatatgtaatttgtgtgtgtatgtgtatgtgtgtgtgtatatatatgtatgcatatattcctttctttgaaaaatggcaacaatctatacacactttattaaaatttgtagcttgtgtacagacacacatgtaaaacaaatacatattttaaagactattttaatatctggtcaatgtccttatcaatatgtagaagaaacctcattctttgttataggtgcatagcattccactgtatacgaggccatgtcttatgtggcctttgccttatagtagacatttattttgttgtcctaattataagaattaggaagacattaattttgtcttcctaattataagaagtgctacaatgaattacatagaagcagaatttcttggtgaaaggttttattcattgataattcagatagaaatttccagtcttctgtttccactaggaatgtactctttcttcattcaggttggagtcaacccctgcacatttcaccttgctcaaatttcttatcctgctaaaatatatatgcttgtacagagagatagatgataggttgccatttgtaaagccaggggaaccctagtttttaagccactccattcaggactgaggcaaaatttgaaattaagccatgtttaccagagacaagacaatgtgatctggctacagcttttgacctctcaaatgtttgcctttcctctccactcttgtactcttaacattgagagctaggatctagggaactgggatccaactctctcctgcttaaatattgttctggtcctcaggcctgaggttggggactcagctccccatctctagtttctgtctgataaccccaactagtatcccaacactcctaatcaatggcttgggtcatttttatggggagggaagtattttaagttgtaatcttgactatggacattggaaagacttaaataacatttcgcagaccactggatggctttttagttcaacaactttaattaaaaacctgaagacataaatcaacttaatgttatcttaaggaacttagttaaaaacaggttgacagagggaacattctattaaaaatgtgatcctaagacttagtgtgcttttccaagaaatctgttgatcttggctgtaagaaatttcaagtcctaaaagaggagtaatacttagacaaagaccaagtgtatactttaatacaragataatttaaacctctttcagattgtatttcttaaaactgcaaaatttgcttgcttcattaaaaacgaggcctttcagactgaataatatagtgaatttaccattagcaaaagtgacactgaaatagtcattttcacatatttacaaaacttaagcctatatttaagaagactggaaaggaaacaattttatacaatcaagatagtataggagttctaaaattagttcagatggagggacactgtgttctttgataataacataaaatagttatcataaaattcagtatctaatgatgaattatgggccttaatgaaatactgttatagagtagattatattataaacccataggcaacaagtttttaagaaaaatgtatgaaaaatacttaattgagaaacctctaacattaaaatattttgctttttctgctggaatactaaagagccagcttgcagagcattgatgtttcaaaagagaaaaagttcatcagagaaaaaaatagatgcctattattggctgttgctctaataagcttttattagaaaataggttggcaattagttctgcgaaattgagcacatagctttgaacttgatggttctgctctgtctctcagtctgataaatatatatgagtatatatatttttcatcattggcaacaaaatatcactttggtcagtactttccttaagggcttggaaataaaacagtgcatttattaaattccttagggaccatgaccttcaggatatctcttcaaactctcacggttttaggagcagacacttggcatcttaaaggtttttaaaacagaaccccaatatcatgaaaaaagaaatagaagacatgtagatttggaaaatcaactcgtttcactaatacctgaatattaagaagggagtatatgctttgaaaaacttttccagagcattcactctaatcgtaaagatcagtgtggatcaccatgctgtgtaaagttaaaaaacatcgcactgggtgtttgagaacaggcacttagagttgcaatcaaaatgaaaacaaattagtgcaattaatttattgatttataatatccttttcctttgtggtgattatttaaaatattatggtctcataaataactggtttgaactgctctcatttctgtcttagattattgcaagagctttttatagtcttcctgcttctctcttgtgtcttttcccttaaaggcttgcctcaacacagcagccagaggaatccagttaagcccatggcagacaatgtcattcttctttcaaagcccaccacatctttcccatctcatttacagtgaaagcctgagtacctataagccccaacaagaccctcactctttcttctctggctccttttacctagtcactgacctcttcaaaggtctttagagacagcagacatgctctgccacagggcctttgcacctgctttccctcatacttccccagacatcctccaggctgactcctcttatccttgggatcagtgaggcttgttaccatctaggaacaaatcctgccttatttatttttctttgttatcataatttgcaacatactgaatatttatttactgttcttatttattatctccctcccctacaagaatttaaactcagtgagggcagaggctcttgtttgttttgctcactattgtattgttaatacttagaagggagcctggtacatagaagatgctcaataaacattttctgaattcttataagaatgaacactaagtgcctctgccttcatcatacaatgtcagtgttccaaagaccaccaggagcacacctgcagttaaattagtttactttatcagttattgtgggaagggagggtgcacaycatgggaagccatggggtgtctcagtaagagggtattaggaggaaactatcatatgatttaggttttggctgagtgacttggtgaagagtctaagaaggcagggattttctctagattagatgttgtcagaaagcagaggcgttcctgtgattgggtaaagaatagcagtcattcattcagcaagagagagggatgtttggtattttgtgggttgcacagtgaccttcttttctgatcttagacaatatttaaaagtggcctggctttgtctcattttattatggtctgagagtaaacttgtccagactggtattctgtgacattgtttaagagaagcattatgcagcctagctgtgagtgtagtactcacagtttctgaatgccaagggttgctcttttttttcttttaatttatcacaagcaagtaagcttctttggggaaggagtgagaagggagataggaataagtaggggataggagatagaggcttttttgcagactcttgtagctgtacatggtggtcctgtctccctcaaaagaacatccctcctgccaccttcttcactgtctccttcactgtcaggaggaaggggcagtgatgaggtgaggtgcttgagccgacctgaaataggccctgtctgtttgctgcttttgccacatttgtctctggtcagggtaagaagattagaactatgaaaccaaggtcaacatagtagcagctaaaccttcctcacttccttctactagaggaggggtcaggagaaagctacttccctttacctatggctttaatgagtatgtcatttcattgaaaatcatttgttcaggggcctttaaaatgtcttcacagaagtttccttgttgaaggaaaggaactagtccttcctatatattcccagaacagaccttacttctaaggagagaaacctgggcattaaaatttaagggacaagtccaggttaaattcctcattcacttctacctccaatatcttgctaactctttctaaacattgtcatttagaggtttgtttacaggagcacatttgcctaggcggattatggaagggggaagggagaaagaaaaggaaggttgctattgctggtgatatggttaactgtggataattgcacaggttgctatgctacaagaactagtcaagataaggcagagctcagcggtggggattttaatggcataggtggggtgagggaaagaggtctagggaagctctgaagcaaagggcacttttggaagggcaggcttggggaggttccttggtgaaggaaggacaagagaaacagagattgcatggtgggacagggaagggaaaacagtgtctgagaggggtcacgtgaggggatctcctcccaacaagccatatttaactaggagggcacaccagtgccctgacctggctgtataggaagcagaaacctgacatacagcaagcagaagacacgggcacaggattttacttatttattttgtcttttttggtcgtgcacccacacattttatcaggagctatgtctaccatctgccatgtaaggtgcacctccagttcaccagaacaaacagttcaccagttctctttcaactacagtgtcttccctgagacactgagaacaataataacattccaagataggagaagagaatcacttggtaactttgtaataaatgaaccaggatgttctatggtggtgatgagggagccgaccaaaggggaaacaatagtcagtggaaaactatgttttgaatgagaccaaagcaggaagtatctggcagggtagatttttctttttttggtacacaaatatagtcttttctaatgtaactcaattttaaatttaaagaaaagcttcttcccccttctattaatgaatgcatatgtaaatctatttttcttacctggaggcaaaatataataaaaaatcaaagagaaggggaagttttgagtaccacaatttttcttactcataaaattagattcccttgaaaatactattctcttcaaatcataatttagagctacagtatgatatatttcatgctactaagtggggtaatcttattcagctttgtgcatggaggagtatattcaataaatgaaaatatctacctctatagctcctaaatactggtgttttgtgtttatccatttacttaggccttcttaaatgtctttggaggaagttttgtgaattacttaaaatttttttacagcagtgtccaaggcctgagaaatacyatgaggtttggctggtgacacctggtggttagacgtgataattacacacaacatgtagcacaggctttactacaagccacaaaagcaccttgtattggtccattctcacactgctaatgaaaacattcctgagactgggtaatttataaagaaaaagagagttaatggactcacagatccacatggttggggacccctcacaatcatggcagaaggtgaaggaggagcaaaatcacatcttacatggtggctggcaagagagcatgctcaggggaaccaccctttataaaaccatcagatggcatgagacttattcattatcacaagaacagcatgggaaatctcgcccttgtgatacaattacctgccaccacgtccctcctatgacagggagaataggggagctacaattcaagatgagatttggctggagacacagccaaaccatatcacttctctataaatcagagttcctggttgtaagcaaccaaaacaaaccttgcttacttgagcagaaaggcggtgtcccttgaggacaatatctccacttaacagtaacattatgggcatcaggttcagaatctggatgccccagcttgctgctccttgacactggaatttacgtcaccactggcaatgtcacctcagcctccttgaatctcaatatccaaattcaaagcctagattaggatgcatctaattggactgacgacagtcatagaccaataccaaacctgcaaggaaggctgggacattttggcttatttaatgaaatatgggctttgccttccaagatacttatggtgcagaattgactactgaggaaaggggtctgtatccggagcacacagccaaaggacaaatgtctactggacaccttaatctcactaggcatcaggcataaccacaatgcattttcatcttaatgacacacaagactgcaaacgttttatgccatcaaaccctttgatgagcttttacaaaaataatttcatagtagttttacaaagagatgactaaaaaataacttgacaaagtagccactatcgtcttccctcttctactatccaaacacctacctatcttctctttctctctcttttttttttttttttttttgagactgagtctcgctctgttgccaggctggagggcagtggtgtgatcttggttcactgcaaccgccacctcccaggttgaagcgattctcctgcctcagcctcctcagtagctgggactacaggcatgtgccaccacgccaagctaatttttgtatttttggtagagatggggtttccccatgttggccaggatggtcttgatctcttgaccttgtgaccatctcggcctcaccaaagtgctgggattataggcgtgagccaccctgcctggctctatcttctcttttaactccagtgtcttccctgagacattctgttacaccaggggtttggtctaggtcctgttgcttgctgcagagaaagccaatcactgagtcaaggagtattgctggggaagaaggccttatttgggtgctgcagccaaggagaataaaggatcagtctggaatccatctccccaagcaactaaaatttggggtctataaagtagggaagaaaagtaactatgtgtgggaaaacaggaattaaggaagggtaagaaagaggacttggtcaacaggcaagtggtcagttaggcaatcatgatgagtgaggcatctggtgtctcattgtttagatgtgataatctggtaagtttcagttccttgaaacattctgggaggcttgatggttggtttaccgagaaaggaacccagataagacaaatataactttcttaagttttaccctgggagggtcaatttctaagtttattcagaagaaacccaaaacatctattctttgggatagttgggctggttttaatttcttgccactcaaatcactttcctttccattcctacctactgcttactccaagaagtaattgctccaataaattatcatgtagtacttgttatgcatttttattatttaaattttacatcaccttgccttccatataaagtgacatcaggcaagccttttcatctctctaagcctcagtttccccatttgtaaaatggaaatgtaattataagccttatgtagttattacaagtttaaaaaaaatatttacaaagcagttaagcacaatgcctgggatttgatgagttttgcaaaatgatggtaaatattatttcacatctttatctgatcatgaactccttaaaggcaaggactacatcttattcattttgttttctggacatggggtctggtgctccatgaatgtttgttgaattgcatttcctgcccctgaatagaagctaggtctctacatatgcttctatatctcaatttatttataggcctctttgagacctttaagtgatacactttacaaatagtcatatataataataatatctatttattatttgagtctttttcctcaaaactatgactaacagaaaattaaatctctccacaggtcttctagagtgcactaaagcagaagataacrtaacatttttatcttaccrtgaaagtattatctgaaggacagttaaagctttgtgttgttcaaccagtacatctcacttcatggctccttatattttttattctaaagtctatctcttgtctaaaacctgctcgacttccaatttatcaaaggaaaccttttatagctgcttggaatgctccaacagatcagtgtttgataaaatataatttaagactaaatttgaaaatgtttcctgtgattggaagcccactggccaaggccagggggcaaaatgtcactatattttatgtcaacagattgggatactatccgtggtatacatcacaaggggtccccattaatggaggtctcccacagaacataagtttacaagtacatctggaaaaagctgaccaagatattaattattacatccctgctgaagatttcagtggacttgctgttatagattgggaatattggcgaccacagtgggcccggaactggaactcaaaagatgtttacagacagaagtcaagaaagcttatttccgatatgggaaagaatgtatcagctaccgatattgaatatttagccaaagtgacctttgaagaaagtgcaaaagctttcatgaaggaaaccatcaaattgggaattaagagccgacccaaaggcctttggggttattatttatatcctgattgccacaattataacgtttatgccccaaactactctgggtcatgcccagaagacgaagtcttgaggaacaatgagctctcttggctctggaacagcagtgctgctttatatccttctatcggtgtctggaaatcccttggagacagtgaaaacattttgcgcttctccaaatttcgggtgcatgaatccatgaggatctccaccatgacatctcatgattatgctctgcctgtatttgtctacacaaggctagggtacagagatgaacctttatttttcctttctaaggtaagaagcttcttgtccaatggtgggggatttcctccttatctctaaaaggacatttctttgttaattatgttctttgaagaattgatttcaattaatggtttgttatatgggagcataattcttccttgactagtcatgcatttagactcttcatttatggaaactgaattttgattatcttactcattattattctcttaaggaacaaagtaaggtgagaaagggttaaagtagataccagcaacgactacatttcctgcacaccaactttaactgtactcacttacaatcgggcattttggaaggttattgaaatgatcggcagtgagcaggttagacaatcaaaaaggatgttttgaaatggagtgtttgctcatacatgtggaagcagaattgtctagccacttaaacaaaaaaattctagggaaagtagtgggtattttaatctttgttttgttttttttttytcttcaagatggagttttttgttcttgtcacctaggctggagtgtaatgatgcaatctcggctcactgcaccccccacctcctgggttcaagcgattctcctgcctcagcctcccaagtagctgggtttacaggtgcycacccmcccccacccagctaatttttgtacttttagtaaagacggggtttcaccatgttggacaggctggccttgaactcctgacctcaggtgatccaccctcctcggcctcccaaagtgctgagattacaggcatgagccaccgtgcccagcctaatctttggatttggataattttgtgtaacctttctacattgagaagactcaggacttgtggagggcttcacatgtgtgatgcagtgatgttttaaggtattgctggataccagtggtttaatatattttaacagaggcatttttcctttctccaccattacaaatttcaactcaccaatatctgttaaagacgttctgagttctaggcatcctaaggaggaggcatagaaaacacccaggtgagggctctacagtgaccaggtatctttggaacataaatggaatgtattcatcagagggagaaatgatgcatgtgtatgaaatatggtaaataccatacctccaacatcactcatgaggtgaaggaggaaggaaaaaaagtctctgttgtgaacttctattcataccacccagaaaaatcagtgaaaaataattgartgaagaataataggaagtcagtaccgtctgaaaggttttaaaaagttatctaggccgggtgcagtggctcacacctgtaatcccagctctttgggaggttgaggcaggtggatcacaaggtcaggagtttaagaccagcctgaccaagatagtgaaacctcatctctactaaaaatacaaaaattagctaggtgtggtggtgggtacctgtaatcccagctactcaggagtctgagaagagaattgcttgaactcgggaggcagaggttgcagtgagccgagattgtgccactgcactccagcctgggcgacagagcgaaactccatctcaaaaaaaaaaaaaaagaaagaaagttacgtaaatctttataaaataatcttgactctggaatggaatcaaaatttaaataccagtttcttttgtaagacgtcttttctatatttgactcaaccaagttcctttctttagtgataataaattgacttttggaagaaacaataaactctgagggacaaaacgttcatttcaaaagatgaatttagactactgggacattctgcacattctgtgaacctggtataagcttctttttctatagctacagccacggaaatgctttctttcctcaggaaaaaaggagcaacagtttgggtttcatctcattctgcactctttttttccgagtggcaagctatttccaagtgttttaaactataagtgtacccaccattgtaccctattgactttaaaaatctgcccatgatttttwtttttttttttagatggagtttccctctgtctcccaggctggagtgcagtggcgcgatttcggctcactgtgacctctgcctcccgggttcaagtgattctcctgcctcagcctccaagtagctgaggttacactgcatgcgccgccatgcccagctaatttttgtgtttttagtagagacggggttttgccgtgttggccaggctggtttcgaactcctgacctcaagagatccacccgccttggcctcccaaagcgctgggattttaggtgtgagccactgcgcccggccccgcccataattttttaaaagcctgatattcatttgtaccaaactcttaatgaccattaatggcttccatttctgattttcccaacaatgtctgaattttagaatgcacacacacatacagttaagattacaaaaaagattcactagtaagtagcaaatctcttaacctccctggacttagtgtcttagtgtcttcatgtacaaaatgggacaatattacctgccccactgacctagcaaaagtatgatgtaaatcaaatgagaacatgcatatgaaaacttgaagctctacagaaacctatgtgatatggctattacttttttaacagccatcaaagccttaaacttaaacatgggatatttaagagtggtatctcaggcaatagctatagcgtggggatatagaggcagtcaaacctcatttcagacagaagattgcctgcattatttacatataaatgcaacctagacataacctgatgctgtgcttttaaaacatttattatttattattagtttttcatttttatacatttacagggtgcaagtgcagttttgttacatggacatattgagtagtggtgaattctgggcttctagtgtacccatcacccgaaaaatgtatattttacccaacaggtcatttcttatccctcactctcctcccacccttgcaccttttggagtctccaatgtctattattgcactctgtatggccrtatttacccatcgtttagctcctacttatcagtaaaaaygtgatattttactttctgtttctgagttatttcacttaaggtaatggcctcctgttccatctgtgagatgtgcttttaaaaattaacaacaggagtttccttgcctatagatttaaagatatttatccttgttattaattcatgctgtctccggtaaggcacaaaggcagctcattagtaatgctccagctccccacagtgggcacgttgcttacatgcactttgataagcgtcagggactgacaccgaagtgttgagtgaatcccctgagtagccctaccctctacttctgaaaccttgattcaggtccaaggatcatgtgtaggtgcaaagcaccctgtgccacactgggacctgggaggctcattttcagtacatctactttgttccttcttttttctgtaatgtgacaacaccactgtggctcaagctttcaggtggtcccaatctgctcccagaggcactttatctgtgactttcctagctgggtagtgcccttgattttctgatccccaaaacatagctgctttgtgattcattcagcaccctactgtctgtgaggtgacagtgaactaatttggtgagaaactgatttgaaaactaatttggaagaaactgacagcaacctcagaaggtgtggctttcaccagaaacatctgacgcttacatacttactatagaccaataatctataaatataaaatgtaaatgttatgtccttattctcctttgatgacaatgccttcatcaaaaggagagctgttagggatttctgccctgatcataccatgtgactatatgacaccattttcagggaagtttcaaagtgagcggagtgaggagttctgctcccttatgtctttgcccaaagagggagtggacgcagactcagcagagtctgcagtcttggtactgcagggatggctcctcctctgtccctgttcatcgtgccattgacaattttcaaaatcctttcatttatactatctcatttgagcctctcaaaacctcctctccttcctttcatgtcagctatgacctgttcaacagatattataatcatagggaatgaaaatggatgttaacctgaaagggaaattagtttaaaccaaaatctctttccttgttgaaagtcacaagacaattgcccagaaaaaaaaaaaaaaactttaaaaactgataytgtaaaacstttttttgagtgttagacaataaaagtgtcagataaagagacttatctctcaagtattaatattaagtgcccaatggcaaaatagcatttacagttctgcttttattttccaccaaatcacctaataacattttctagcgtttaattggtagaaattcacccttggagtaaaaggtgaatgcttagtatcctaaagagtggggtgagggaatgtgttgtaatttaataaactaggaaaccaactacatacattcaaatcttaatttgctccagaaaacggcctagatccctgttaatctttaaacattaaaacaataaccctttaagattataaaatcaaaattctstctgctaaaaccttacctttgtctgtcttaaccatattgcagaaaattccagcgactttaccatgactggatgagtcataaataaaacccattaggtcaggtacttagaaattaaacacacataatttcagggacaaatataaaagctggaccaaatcagagcctgcaagcccttaacgttgcttctttgcctggccttggaattgaaatgactatggggatgaagtgtcactggggcatgttgcaaaatggaaaaggaacctggttaacaggatcgcatttggagaaggaaaacttttggattctgtttccagggcacatacatatgacctggtatgtgggtatgtgcccccgatttatttcaattaaataatttctgataactatttacagcctcattgccttcaatataatatcctgcatggcaaaatatgtttttctttaaaaatatttatgtttttgcatatgattacagagtgtgatttttgagcattggtttattcagcatttgtgtcactctaagaaaatagaaaatagtatctaaggagtatatgagctcagtaccagccctgttatactgaactcagactctaatcctaatccctggtgggtttttttgttttttgcttttgaggcggagtctcaccctgtcatctaggctggagtgcaatggtgcgatctcggctcactgcaacctccgtctcctgggttcaaatgattctcctgtctcagcctccgagtagctgggattataggcgcccaccaccacgccyggctaatttttttttgtattttcagtagagacggggtttcactgtgttgaccaggctggtctcaaactcttgacctcgtgatctgcccgcctgggcctcccaaagtgctgggattacaggcgtgagccaccgcgcccagcccctggtggattgttttacattcaaattaataatgaactctactgtcttcaatctagcaagatctagtcagcaccataggagaaagtgctgccttgggagctgcaggcattgttatttggggagacatgaatttaactgcatccaaggtaagtcagtatcttgaaggtatatttaatgttttctattaaaagtatttctctgctttcttggagagcttaatgacctccatagcaaaccagctttagaataaatattccaaatcagtgcctgatacatagcaaaggctaaaaaatattgtgaacttttataaagatagtaatcataacactgacatttgatgaatatttatgatgcgctaaggttgtgctaagagattttttgagtcggatttgctcacttactggtcatatgaggtagtgactatcatcctcatttacagatggtgaaactagagaggaaaccaactaggttaataactatttaggatagttagtggtagagttggcattagccacagtttgatgatggacaccttgcatttaatgactatagaaaatgtgttatatactattttgagaggtagaaacaggtggtaactttttaattctccacaatgaagttactttttcctctacagagaaatcagctgaaaattatcagcatttaaaataagatttatggcggggcacggtggctcatgcctgtaattcctgcattttgggaggtgggatcacttcaggccaggagttcgagaccagcctgactgacatgaagaaagccagtctctactagaaatataaaaattaggcgagtgtgatgacacatgcctgtaatcccagctgctcgggaggctgaggcaggagaatcacttgaagctgggaggcagaggttgcagtgagccaagatgacaccactgcactcgagcctggttcaaagagtgagactccatctcaaaaaaaaaaaraaaagaaaaaaaaaagatttatatggctcttcaaatttctctcagctgagatttttttttactccaggaaagattcctagttttccccaatccacattaatcacaatctcttccatatttccagatgcggtttgtttatatttctataatgtaatgcattttaccttgaatactggcacccttgacactttttgctaaattgaatttttttgcaagtccatgatgatctgatattattctcagaatttcacagtctcaatttgttgctactgagatagtgttcatgaaactgtttatgcctatgcccacatatgagaattaggtagaaactgagaggattaattcctgactttccaggtgtgatatttccaccccagtcccttggtggctcgtcagaagagcttcatcaggaaggtgggtgcacacaggtggcctctgtttagaacacgtaataggaaccatatacacaaaagttacttagccatataggttttcatgtgtttgaattgtattagaagtacaggacccaggacagttgatggaaattaacaggaaaatccagaaggctataatacttggtagartggtggcataagatgatttgacaataaatgatggactatgattcaggctctaacacaaccaaggaaggccccacatacctgaatggtagctgagggcagcagttctggtacattcctaatttgggtttgttccttttccttttatacccattaacttgggagctagaaggaagaaaaaaagaatgtaaattgcagaaaggcaaggtctcatgtgctgattctgggggctatttgcaagttcagttgcttagcctgattataacatagtatccatctcctgcccctcagacctctcccctttctgatttgggacccttgttatagtgcccaggagcctacaagttcaacaactgaaccaagccattatgttttaatcaagaccaaagaactgtgctagaagctctaattctatcagtaccagcgagaaacactaaaatcgatttctttgtacatttctaccagggagaacacactaaaattgatttcttcctacatttctaggccaactgtacaaaggtgaagcagtttgtgagttctgatttagggagctacatagccaatgtgaccagagctgctgaggtatgcagccttcacctctgcaggaacaatggcaggtgcataaggaagatgtggaacgcgcccagttaccttcacttgaaccctgcaagttaccacatagaggcctctgaggacggggagtttactgtgaaaggaaaagcatctgatacagacctggcagtgatggcagatacattttcctgtcattgttatcagggatatgaaggagctgattgcagagaaataaagacggctgatggctgctctggggtttccccttctcctggttcactaatgacactttgtctactgcttttagcaagttatcgaagcattcagttgtgagataattgagtttaaagggaattgtgtggcctctagcctagtcatttaaagaaggatgtaacttataacattttttttctcttatgaattctattgagagatattataagtagacattatgtatgtcacttaacataaacagaaacattattttatttgcctccagtctggctaggaaaccagatctggggtaaagtcaatgtacacttcctccttattggaatatttaagttgcatttaaactaaaactagtataatttagtcttttcatgaatgtacatacataaaattatacataaaaatattaaattattcatttcaaagactgttttttcaagttggcaatttatttaaggacacattactaagtaatcatctgatttaacagaaggggtcacctggtcaactggtccactgaagaggactaaatccagtttctattctagcctcgggttcacactaggtttctgtttcccacttggactcattaaatgcagaaccattcctggcatagcttctcatgaggggccggagactgaggtaagggggagccattaccaacttgcaaagcaccaattctaagatggcacttggagtccttccttcgtagaccctggcagtctgaacactgtcaaggctttgggataatattcatgcttacctaccctgacactgctgtagatctgggagctggagccatattagtaaagatgcagttggtgacttttgcaagcaaaaatcattatgtagaaaacatgacatttaaggggtccagaagtgctatggaaaaggaggcctatgagaaatgttagatatttttgctttccccttcccatgtatgactttttatagtgaatttagagtcattttgaatcaatttgaatcatggtttcactacgtatctagttgtgtgaccttgggaaatttacctacagtccccattttgttatctgaaatttagtaatataactccgacttcaattaattattctgaggagtaaatggaataacatagccattgcatacttggactccgctgttgatcctcaactgacttttttttttttttttttttttgtagtgatggggtcttgttttgttatccagcccggtctcggacttccaggctcaagagatcctcttgccttagcctcccaaagttctgggattataggtgtgaaccacggcacccagcctcaaccaactgttgattaccaaagtaatgggaaagtgcaggataaaacagggtcttgggcaatttctacttcttgatgctatattctgtttaaaatcacttatacgcattgtgtttttctcttgagagtcatgtttaattgataggacttccttcttctggagacaatctacttgaaaggtaaactcaaagtaagtaatgatgctgttgtagaagaaattatagttgattcaacctccttcttcacctctgtttttctgtgaaacatttgaaatccaggtgtgttcttttcaactgcgagtctatgcttgttggaggttattgacattgttaaggtctaatttctaaatgtaaaaaacataacaaaacaaaatgctgtgaatggtaggtagtattgcattgattagctttttaaaaaattaaacttatttctatatcaaagatgatacaatgaaattatagaaaatttgtgaaaatagaaaaaatgataaaggaaatcaccaataatcactataacataaacgggtaacttttggtatattactttctaatatttcttctaaagaccttttaatatgtttgtaatagtaatatatgcatatgcattttcacttacccatccattataagtagtatccgtgttatttcataaactttatagctattacttaaaatcatttttaaggccacataatggtctatcaactagatgtaacacaatttaattaacaattttctgtatgctgtgattttttttaaatgccaagcttttactatttagtcacttcatcagagaaaactttccagatcatccttctaattcattcattcactcattgatcagtttgtttgttaatcaatttattgagcattacacgttagtaggtactgcctaagctttggaatacatccttgaacaaaacagacaaagagtcctggcatcttggaatttacgttatagctcagagaaacatattaaacacacaaataagcaatttatatcatatgttagaaggggataagatttataggaaaaaatatagagagcagagtgggggagggagggatattctgtgtttaggcctcatcaagcaggtgcccatttgaacgaaaacttgaaaaaggagagagagttagccatgagaatacttgggggaagggtatgccaggcgcacaaatcagctgttgcaaatttggtagtgggcctggtgtattccattttctgtcgttccttactagaatgtaaactaggaaaatgaggacttcactttgttcactgctagaacactacttgctacagtgtctgacacttagtaggtcttcaacaagtatcgttaaatgaaggaattaatgagtgattcagaaacctgaatcggtagaacctataaatacgttgtaatttttttttaactctgcacatcagtagtgagttattacaaagttcttctcaagcattactgttctatttttatcctagaagattagcttgtgaaatcacatatcctcattcccctgtgaagaattgagacctggagagaataaatctcttgacaaactcaaatggcgagtttgtaaaagagcccagtctgtaatcccagttgctgagctttctttctatcataactttgtcttcctcttcttgtaaatgaatccaaatatacttgttctaattttgagcataaatttaatgcattttaacatttttcttaatttgggctgctactactggttatgttcaatcatttctcacattttgcagctgtagattacctgtgcatttaatttggctcactgctcctggataggaaatctacctcctactccgcttgatgacctcagcttcttaggatcatggtaattttcctttacagaaacagcaagataccagtcactctaatctttggtgctctcccttataaaagggagataataataataataatttttgttcttttatacagatttaatgatataaactaggtaacatagcacaaaagctgacatataaaacattctaggaaatgttagctgttattatgatgtactttcaatactggttctcataaaagttgtgataggtaatattatctctattttgaagtacaagaaattatgtataactcagaatagtgaaatgacttacttaatatcacacagcagttcccaggctttaaacctttacttttgaaacttcaactaattttctttccatcagatctccagcagaaactatagaagacttatttgtactttttaaaaaccaatttacaaagatatataattcacaagtatagtgattctggtatcaggcagtcagtgctttctttgaccccttggaagaaaaactgttaaattaactggtctactagcaatgtacccatctgacatactctaagtatctaaattttgtttattcataaagaaaccaggactccttaggaaaatgtctgattccaggcctatctaagacaggaattgctctagatgagtctggaatctcttcttataacataaagcaaggaagctatcaaggattactagaattgtatcaaaagcacccttgagtcaacttaaaagagcctcccactgtcaaacatgtgaaatttgaaaatcactgaagaaatactaactgcaatgggttgaaatacatcagatatatttaaatccatgaagtcaaaatgatactaaaacaaacccaaaaatctttcattggccacttttgaacaatattaaggaatcaactcattactctgaaaactgataatcaatcatttattctgcatttcctacataatctgtacttgagggtaaccaaatagtgaaggagagtaatttctttttattcaagccaataaacggggaaagtatgatgtaattagaatagaacaattttgtaacttctaattaatggatagaggcattgaccctcaatagctgctaaaatcacaaaaaagagtcaaccagacaattatataccacctagttgaagtatgaaacatcaactaagaataatccttccagaaatcaagctgaaatttgatcaggcctttaaaatttagctacttccgatgttttcagcatggtttgggaaaaaaaaatctatctactaactcaagaaacataaagaataagggaaaatgctaaacaagaagttagagatgacatcatcaaaatttagatcctagggaattctacaggacaaataacttgaatttatcaacaaataagaaaaaaatggcgaaggaatccatatgtatatcaacatggagcttgctaaattatagtacatctgcatattggggaagtattcaattttacaaagaaatgaggaataacatctctatgctaatctcaaaagatatctaaaaattattttgtttagactttattttgactgccatctaatcatattgagaaaaactcatgatctcagatattagaaatatatttttggtcacattctagaaagacttcctggagacagctaaactaaagtttcttaagcatgtactgggcctgaaattctaagggtcttaagaatgtactgggtttgaaattctattacagataaaaagccataaatgattcaaggaaatgataatttcatcaataaaaggaaaccaggagaagccatttgaagccacacacaacaaatataaaatcatatatggtgctgttattgtttttgagattttgcttattctaaaccttgaacagcaggtctgttacaatattataattataaacttatatgataaagatttaataattggaaaaattaattttgtgccaaaatgaatgttagtattatggttttcattcctaccagagaactaagtacatacagacactcttacttttgtatttaatgctgatcttaagaacttggaaaaatctgaatgttactgaaaattcatatatgaactggacactttgttccctcctaagggcccaggagctatcaattttttatttctagtatcacttcaattgtacaaacttaaaatgggagactttgttctctgtttctggaaaatgaaagttcttgggttatcactgggactacttattgcattcggcattctcttccactaagatacctagcatagtggttaattgtatgtgtcaacttgactgagccatagactgtgtttattctgagcgtgtctgtgagggcgttttggaatgaggttaacatttacacgagaagactgagtaaagcagattgtcctccccagtgtggtgggcctcatccaatctgttgaaggcctgaacaaaggcagtgtaagggagacttaagctctgtgtttgagctgagacattggtcttttcctgtcttcagactcagacacagactgaagttatgccatcagcccacctaatcctcagtcctgtatcattgagtctcctgaacctccagctttccaactacagatcttggaacttctcagcctccataactgtgaacccatttattagagtaaatctctctctctctttctctctgataaacacacacacacacacacacacacacacacacacacacacacacacactattggttctgtttctcgggagaatgcagactaatacaccaagaaaagtaattttctgctgtcaaatttattgctatccacaaaagacaacaagtgttgccaagaatgtggagaaattggggcccttgcttattgttggtgagaatgaaaaatgaggcagccactagggtaaacagtatggaagttcctaaaaaaaattaaaaatagaactaccatatgatctagcaatccctcttccgagtattttcctaaaagaattgaaatcaggatctcaaagagatataagcctccctgtgttaactgaagtactatttacaatagacaatatgtagagataacctaaaactgtatcaacttctcattactcagaatatgtactttccaaaatgatttataaatatgacattcattattgaaatatgtgcaggagttagaaaaactggataattgagttgagcacattatcaagcatttactttgtttcttgatgtaagagatacttctgatagttctgatcaacaacatgtgtgttttttttaagatataaaactttgtctaatggcaccacatca

SEQ ID NO: 93478 - DNA, 13276 bp, Homo sapiens
attatatggcatttttggaagttagtgagactgaagaggaaaaaaatgccagtttggatgtggttgcactgactcagatataaaataattaacaccagaaggaagcagtagggaatgaagaggaggaatggattagttctcacactgctataaagaactacctgagactgggtaatttatgaagaaaagaggtttaattgattcacagttctgcaagctgttcaggaaacatagctgggaggcctcaggaatcttacaatcatggcagaaggtgaagggagggcaagcacatctttacatgggagcaggagacagagagagaagggggaagtgctacactttcaaacaaccagatctcgtgagaactcactcaatatcatgagaacaacagggaggaaatctgcccccatgattcaatcacctcccattagccccctcccccaacattagggattccaattcaacacgagatttgggtggggacacagagccaaaccatatcaaggaatgagcaataggaaggaagaggagatgggattagatattcacattctttcatgtgccctctgctccagccacatcaaattatgtacctttccttgagttcagcatgcttttttcatatgtgtgtgtatgcacatgtgtgtattcttttctgaggtgaggaagaagggatctctttatgtacttagggtctcagtgcccaccagattataagcaacctgatggcaggaaccatgccttgattatcattatactcctaaaaccctatgaagagcttcgtactaaatagagacttagtacattgctggtaaatgaatgaatggatgaatgaatcaatgaatacataggtgtaacttcaccttctttcccactcattcattagaactcagctcaaaaagaactcctctttataaagctgaattcctttctttactcttgttacttccctcagagtactgtgttcctagagaatcttgcattattacatgaaatcaaactgaatagcgatggtctctgtcagccccaggagaattttagaactcacgggggaagtcttattttttatcctatctgtagtgcctggtgcagtacagacagtttatagttgttgcctaataaatgttagtaagatgaacatgtacttacactttaccaggtttatctctgatgaatcaatcatctttctaaacaattcagactgactattcatcatttcatttggtaatccagtccatgatctgatcttcaactttgatatatctttagcctgacaacagtttaattgctggactgcgcaaagatggacacagtctcactctttttgtgcctgatcaaatgaatgtatgcttaatgtagtgaaaacttcagacaacttggcatcataatggctaagaaccataaaaatgaagaagagtataagcagttgcttgcctgtgttctaattgtataggcactgttttagcttaccatctgcaaaattagaatgatattaagtttatcccgagtgtaaagtatgaatagtaggtggttagggggtattttggacttacagtaccctttgccagcagtggtttgaagattcttgatgctgctrctatgtgcttttatcccctctgagagcactccatttgcctcattaaccataggacttgaattaatakgaattattaaagcaatttcttrttgtctgctttttaaaaagcatttggctaaacatcattgttcttttcacaggaaatgttgattaaccctttagcataattgtttaaagaaaacataatattgccagtttttttaatgccttaagacagtgttaataatgaaatataacatagttaattattatgaccctgcctcccccttccatggggagaaaagaagtgctatgaatatacaaacaatagattttcaatggattaccatatttcttcttccttttcatctagtttttgcacatctcttctactattatcacacttacaatgtcaccatcaatcttggattttcatagtgtttagcattaaaaagaaaccactgcatagtcttagacattcagctacaagaagagtttagtaaacactatagctttagtcatgcacaactagggaactagaagactaaagagctcctttaggtattgtttgagatagatatgtaaactgggtggacgccaattgacaactgtaatcaagattcataagttcagagtggacaaaccagatagatggtggaccttacataccaattttgaagtgtatttatccatgcctgagtgtgctgtcattacacatctgtttataggagcatgtagtcttccggagtcagttttgtcaactatgttggtctcttgtgcctgaaacaatctttaggggaacaaggatgaaagtcacttctctagggtatatagcctttctctagatttctcaatttggatacgtttaggtaggagtgattcagagctttgtgcccaaacctggtcgcaaggagacagtataatgaaatcaatcctgactctaattattatccgcctagacttcagacaagctaatatagctctcttgatccttgatttcctcaactataccagatgaaattttataagaattaaatagagtattctatgtaaaagagttaaaacagcgctggcatagagtaagtccttagtaaattttagttgttattttctcacacaaaccttaaaaggaagctcagataatcctggcttcttcttgctgacttctacgtcgtgcagtttggaaggctctgtcagatggcagtggctcccttggtcttccagaatttcctgctttagtctgcaggcataacaggagatatgaccttatttagacattaaagggaggaggtggggaagaagggaaaggaagaagggaaagagagagaaccgaagaagggaagggaagaaagaagagatgaaaggagagaaaaagaaaggaggaaagaaataccttttcctcacaaactttgccagtctattatgaggacagcatttgctaattagcaaactgttttaaaatttgtacaaaaataattatggatgaaacagaaagctatgccttaacacattgtaatattgagttatatttgtctttatttcagttgattcaacagttggcattgccacccattaccttatcagtatgcaaaccttggttttccattttgaatttgtatttttaaaacttacattaaacatttccctgtgaatagtataagtttctcatatgatggttaatgataactttgcttaatccagaaaccgtagtttttctctaacactgtaaaatcattttaggtcttactacaggcaaacaatgacatttatactagagctgaagataaagtaagtgttgggtgcttcttcctggttcgaaggatgacttagtcaggaaagttaatgactgatatttggctatagaataatttagaagggaaaggcaaaatcaatttttatgaattaaaaaactctcatgattatttaacatgctatttataagctcttttgtaatggagaatgctgacataagaaaaactagtgtaaactatgaggcaaaaattacactattttgtcttagctttgaataaataaatactaaaatttgttctacaaaagataggcctagttgtattttacaaaggctatgtttgtatagcatctcatggatataagtttatattcaaagttaatataatttttaaattgtttgcatttttaaaatttttttgacaattatcacagccgagctgaaagtgttaggcaagttaaagtaggcactgagaagacacttttttattcctcctgatagtcattgatataattaactgccagcagcaaagttatatatatattccatggccttgaatttgagtctagctaactggcccctgtggggctaatgcccatgactttggccttttttactatacttaatagtacagaaatayagattcattcggctcctgaaggattagagctttctccatctagcctcctcttcaatacctatgctgaattttttctttttttgctttcaaggatctaaatttggcaataattggtgagtgctgattcttaaacttaaaaaaagtcatattggcaatctttttttctctctagtcacaaagtgttaaaaacaccaaagagaaaaatggaaatgtcctagcattcctagaaggcattgttctttatgctccctttaggctaagaaagggaatgctatttcttcttccttgttcttaaagaagggagagaatgcaaagaatattagatcaggaaaatgttctactttttcagtcttattaatatgcccttcccaccagtaccagcccctctcttcttttctttttcaccccttctctcactagcaacaatttcctgaggacacagagtctgatagtgcaaatagggtcacatttggagacagttcggtgatatatgctaatatccactctggactagctgagatcaccaatttcatttctcttgttatctataccctatgaactgcagccttcagggcaaaaggtatttaacctgcaataatacattgcctgggagccattcagtgtttatgtcagtctatatttttatttagaaacaattagagctagttggatttcaagaattttcttgagtttcaggtcaaagtttattttttaaaaaagagaataatctacaactttgtcagcatgcagctaaaataacaactatatttttagattgctagttcttttttcctttggctgcatttatcccctgctgccataaggtatgcacggacatatacactgagagcacacagggtgaaggatgtgggtatggatggtggggaagatttgtaagagatttgtacttggtagcagtaaaaaaaattccaataaacattgttttcataggataatctcatctctggagaataacaggcatttaattaaaataaaaacacccattgattgaattacaaaatttttagataatcacaattctgacctgttgccaagttagaaaatatagtaatgttctcatttggtactaatggtattggctaccactgaagtttttactcactgtgatacctattaccaataaaacaatgtaaaaacaacttcaaatataattttaaatgattacaaatgttgatcatgttacattatttttcactttacaattatttcttttcatccctaaaaataaatacctgaaaatatgaaatctttatatagacatcgcagacaaaacataaaatctgttcaagtcaggtcccctaatatggactgggataaacagaagccgtgcccatcatcagtgcgctttttcaaaatgcttgtctattacataaataaaataatttcttgccaatgagggcaatttgcatatagcactgagatacagtatctctattttttcattaggctgttttcaaagaagtgagtagaaattcatctgagttatgtatataatgacacgttaaaataatatgcttgtgataatctcatgagaatcaagggccatgtgacctgacagccaggactcagaggggaatggagtttagtaactagatatatccccaaccgtctctagggacctcagagtaagtgtttgtaactaatctacttttcctcccagtgtacaaataaagattaaaattctgcatatctgcttctctagttatcattatcaaacaaatcattctttcatgtgtatatatacagatacacatatacataaacatacatataacttaatccactgcctactattagcttcgatttcttcatctgactcagtttctgcttcttcatgacttcagcttttcatgaactctacggaattctcccataacttatttcctgttttagctctccctgcttactctgattctctccacatttcccattgaaaattccttaaaaaggagaattttatgcttgccctctgctccgtcctgcgtctgcccactgccctcctaccgtccaccatggctcctctgcgctccagctgcgtcgtctccgggatcgccgccgccttccacccgggctcgcctctgatgcccctgccagagccagctcctggtggacccatgtggagatgggaccaccagatcccatccttggagtcaccgaaggctttaagagggacaccaatagcaaaaagatgaatctgggagttagtgcctacagggaccacaacggaaagccttacagcatccacaaggcagaggcccagattgcagccaaaaatttggacgaggactacytctccattgggcggctggctgaattttgcaaggcatctgcagaagyagccttrggcgagaatagcgaagtctcgaaaagtggccggtttgtcactgtgcagaccatttctggaactagtgccttaaggatcagagctagttttctgcaaagatttcttaagttcagccaagatgtctttctgcccraaccaacctggggaagtcgcacacccatcttcagggatactggcatgcagctacaaggttatcgatactatgaccgcaagacttgcggttttgacttcacagacactgtggaggacatttcaaaaacaccagagcaaagtcttcttcttctgcatgcttgctcccataatcccacaggagtggaccctggtcccaagcagcagaaggaaatagcaacagtggtgaagaaaacaaaaatctctttgcactcttcgacatggcctaccaaggctttgccagtggcaatggtaacaaggatgcctgggctgtgcgccactctgccaattatacrccattgtcgctgccaatcatacaccaagaacatggtcttacacagtgagrgtgtggcaggcttcaccatggtttgcaaagacgcagatgaagccaagagggtagagtcacatttgaagatcttgatstgtcccatgtattccaaccctcccctcaatgggacccgtttgcttctaccattctgaatgctccagatttgtgaaaacaatggttgcaagaagtgaaaggcaaggcccatcgcatcattagcatgcaractcagctggtstctaacctcaagaaggagggttctacccactactggccacacatcactgcccaaattgacatgttttgtttcacagggttaaagcccgaacaggtggaaaggatgagcaaggagtcctccatctacgtgacaaaggacagctgcttctctgaggcaggggtcacctccagcaatgtgggctaccttgtccataccattcaccaggtcaccaagtaatgtccctggtgcaaggaaccagagacaacctttctgtcttcagcctctgctactgggagcttcacagaggatgagagagggtggatggtagtaagtggatcatttccttcaaccacagtgtgtaacactcagcgattgaatgtttctcagaaaagaacatgtagtgacatagggcagaggcatctgtggctggtgtctggaacattgtggctctaaacaaaactctaccctatccttttaatccaacttttctcaaagagtttacatgtgcaagaaagtcatcacacaaggaaacctgtcaattatgctattggaatattttagaagatttaactgaagtgttatagagttcgggttcctcatgataaatagcacacattagaggctttgagagaagacctagttctgtcatgaacagttggcctcaggtctgtcctctcatcatggagcaaccttatcaacagaccatattgcagaaatttatgtttatgaaaaccaatgagtctgctgccactacagcaaggaaaatatgcagattcctgtcatatttaagaaaaagagaaggctctcttttcttctttgtcattgctgttcttttccttaggcacaaagaattttaaccaatgtaaatttttatcccattctaccgcatgattgaccatcaaccccatcctatcgggatttatttaaaaataaagaggccgagcacagtggctcatgactaatcccagcactttgggtgggtcacttgaggacagaagtctgagaccagcctggccaacttggttaaaccccgtctctactaaaaaatcagtcaggcatagtagcgggagcctgtaatcccagctactcgggaggctgaggcaggagaatcgcttgaactggggaggcggagggtgcagtgagccaagatcgtgccattgcactccagcctgggcaacaagagcgaaactctatctcagaaaaaaaaaaaaagaaaaaaaaaagaataaagaatgtaattttctgctgatctcataccctcacccttctcggcaaagaatagtggagagtaggtaaccacactttatctcagcatcctcttcaatgattgtgtaaattcctccagttgggatgttgtctctgaccagttggacctcctccctttgttgaatgtggttgtgcatttgctcatctcacatcatgagtcagacgcacaggctagtactaggaaagaggatattctaggctatgtgtgctgccagctgggctcaggcttcacccattggaaagaaccaccatctgctctaattatgtagacttattgcagcctagtttctctgttacaataaaattactgtaaaccgccccccaccctgccaccccatgccctgcaaaaaaagagaattttatttactcatttttttaatgtcaggccttagcattagttcctaaccagacttgggttgtatgcccatgctgactcaatcagttctggcttacgaggtctgtattgtgccacctctttagcatgagctgtaggtaagggcgcttcacacaaaagagtctgacacatcttttacatcctagctcaagctattgttactttaacccactatattttctgaattagtctttccagtaggttatctaaggaaagtaatatggagtcattattagccatacagccccaactcaaatacattgattttgtcaaatatgttgattatgcagtcacctggcagggacctgagagaataggtaatgttggcaagattttatggaatggaaattcaattgggcatcagaagacctggatattagctctctgtggccatgaattaggtctcaaaattgggcaagtttcttagtctttcagactttccattctacatctgaaagttggggagataagctgtacaacttataaggtggctcccagtctgaaattctgtgggcccacatcacgaatcttgaggtcagaatatatctagaatatgaagaaggcaatgagcctctcagaagcttctaggtgataaaagatcagaatgagggcattgctttttttaaaggaagactatctatcagaaatgacctccctgagctaatatgtacttgcaggtctaggatgggttatggcaaacccactgactatagtccacatacaaaatagttgggacaggactgagacactcaaagtctgagagaaatagattctagaggaaggaaggaagtcaatctatcaaatactttcagagatgacttaacttacaattagcgagtgtgcctattctctgatagtcaggaatgtcaacactcagtacattatttgatttagctctacatttttcttatcccagaggctgacagttttcagtggctacagtgagctgaacccccaagaatatagacatgaatgaaattggagttacattaaaaaaaatcaatatgtaacctgagaagcgatatgcaaagtcattggaaggaagctgaatggctcctaggccagcaaacttcacaatcatctgatcgaatatatgagatctaatgaaagactcttagaaggcaggtgctatgatttgaatgtgtccctccaagttcatgtgttgaaaatttaactcccaatgcaatagtgtcaagaggtggaagctttaaaaggtgattaagtcataagttctctccccttatgaatagaataatgttgttatcacaggagtgaatttgttataaaagtaagtttggcttcctcttgttctttcttttgccttgtgatgcctcctgccttctgacacagcaagaaggcctgtactagatgaggatccttgatcttggacttgccagcctccaaaatcatgagccaaataaaatattattgtttgtaaattacccagtcagtgctattttactacagcagcacaaaacagagacagcaggtatcagtaatattttgttatagtagcacaaaatgaaccaagacagcaggtaagcaaatcatggaacaatggccatgacagrgtgttgcaagccaacttggcttgtgctcatctaagcactgtccacagagaagagagttttagccaatggtcttctgctattccagattcattaacaaagtagcaataaatgccagtggtggactttgaggtttttggattctcataatttcttattggagattagtatatggacattctagttatgttaatacataggtccctaagttcttgattaatgtacatttagccttaaagagatgcattttcatttgatgtgataaaacaatcaaatgttgttcttcacacccaaggaccagacactaggcagtgatacattcaccaaagtgatggtggtcacactgaggtcttcaacatggaagaatgtcagtaaatacagacagtcttcccatggtgaccacaacgcatccatgtgccttcaggtcattcttatgcttaatttttaaaaaatatttacacatttgccctcagagtaaaatcccaacttctgacatggccttatccactgctacctcatcttctccaactctgctattcagtgacatcactcaaaccacacttcctctcttcctgtgctgctaacttatcaaggttgtctctgccttggagcctctccactcattcttctcttcgcctggaaatttcttttcctgatatgtatgtggcttattcctgttcagcattcaggccttaattaaaaataatgacagaaggcttctgtgacaatcctatctaatatagttctcctatctctacttcattctatttcatttagttttgaaaagttttatttattatagctaacactagtcaaaatgattgcacttatttgttccctcttttttaaaaaaaatgttttcctcactaaaaatatttattctgtgacagcaggaccttgcctgttatgcccattgctatattcttagcaacaaggagactatctgaaacatatagaaaactcaatcagtgtcctttaaatgaatataacagatttttactctggccgttatctgatcagcttaagcttcccatactagagaacaattatcggttttgttttggtcaggtggtggcattcccatggggctcacaaaaagaccctgatttttagaagaaaactacgtggtttaggttgtgcttctctccagagccttagtccaaagcaaatagacatttagcattaaagaagatgtatttcctacttggaggcctgaggacattatcagctacactgataatctcagaaccagaactaaatagggaattctttcatatgcttctaatcgggtagataagttgtgtatgatttatacaatgtaattcaaagtaaacttttctaattataatgtcactccgtgtttcaggaattgagaagacagtgtgccatagtggaaagagctcaggctctggaaccaatagagctgggtttgcattccgctttattgcttactagacttttgcccatggacgagcccttccaacatttgagtcccagttttctcatctgtaaagcagaactggtaatattttccagagctgccgtgaagcatgtaaatattatgcataaaatacctggcatatcgtagacagttattgacttataactaccatttttatgaagatgtcacagcctatgttggtattgtgtttttgtatttgattttttatctggctgcaagttatagagactacttctgggaacaccaagttatgggttatagaaagacagctatcttgagaggagaaaagtatgaaactcataccattgttgagtactgtctgaactggcagtggatccaagatagcagtgggaactgtagtagctggcattcaagtatatgcactagaggactccaacattcacattgtccagttgctctccaatcagatattttcttctccttttactacttgcttagtctctatatatattgtgtatatctttttattacttcatgctttttgctaacaaatagactacattttttttacagtttcagctgactacaactctgtcttcataactccacctttctcattatgacccatcctctgcttcatacctcttaagtcttatgttcagcttccaaattctactaactgcctggtttttggtttgtttcagtactttgttctgaagaggttctcatattggtcttattcaagttttatgatcaaaaccatgccatcattctctaagccagatatcagtttgacccacttgaaatcaacatttgtatatgtcttaatggacaaacagcaatttcatgtggtacaatcagatacatgttgcctctggtgaggaaccattgctagagccaagagtgaggtagtgctatttaataaataaacaacgataaaagtaagaggtctatttcacccatttaggaccagttgtggctgggacgggcattggattggctttttggcaaaatatttaatcatttttattgcctgaaattttcgacccagaaattttagacctaaaatagaccctttatttagtataaccctttcactttagaaataaggaaaccagacctcaaacagataagtcccatgtgacacataagaaattaaaagttggaaaactaaattagtgaaagaatgttacaaagatactggtttatttatgtccaaaaaatctgagtgtacaaaaaacactaagagacagactattctatcagaaatatcacaatctaatcgggaaggaaagattagtataataaatataataactgtatgcacagggtgaggaagcctaatgatggagtttaggggagactcagggcaattttcaagaagagcagatgtctggactgagactcgaagagctgagtcagtgttgggaggcggctatgactgtgaagcaggttccagagtaagaatggggaagatgtgtgagcgtgtggtacgtggtgtgggaaacaatagggaggttgggccataggttttcgctgagaagtgtccatgtctgtctctcctctccctccctatcctctgca

SEQ ID NO: 93479 - DNA, 19169 bp, Homo sapiens
aatattaaaggaagtatttggaaggaggtaggaaaggtttggggattactgttgactacaaagctttaagagagagatgaattgcgttccatgcagcagtaatagaagtatgtcttaatagctatacatttccccttgacaaattctcacctaaaggaaaagggagcacatccatcctaaaaactgcatataatttttaaaatgtgggttcagattataaacaaagatagcacaaaggatgccttaacaaaaacagatctaggtccttccctaaagagacttataatttacatattgactttttttttttttttgagactgagttttgctcttgtcacccaggctcgagtgcagtggagcaatctctactcactgcagcctctacttcctgggttcaagtgattctcctacctcagactcctgagtagccaggattacaggcgcacaccaccacacctgactaatttttgtattctgagtagagacagggtttcaccatgttggccaggctggtctcaaacacctaacctcaagtgatccgcccacctcggcctcccaaagtgctgggattacaggcataagccactgtgcctggctgtaatttacatattctatacaatactctgtttctgtaatagcaataactcagatttttatgttatactaaacttatgcatgatgttaacattgcagaagcctggaccaaggctgcatgggccctccctatatacctctttggaacctcctgtgaattcatcttgtgaatctataattttttttagcttaaaaatgggggatggaaacagaaaagaaggataactcaattaaaacaaaagatatttaggaaaagaaaattatcactaaaagtttaccaagaatgttggaaccagatgtgttgttttcccccaacagaaagctctgggagagagactaatactaatctataatattacatgcataaacagaaactttcctcttgaaaaatttgcttccctttcctgttcattcacccaagctactttaatgaggtttcttgaggctatcattcattaagcccttctgttcaccagcagattgtataatacccattttatttccccaagtatactcttcctcctagctgtttaagtcaatccagaaatgtctgcattgactcactgaggcaggtcacctaagtattagattgttttcaattacacagttattaattcttttaaacaaagaaaaatgcaaaccaattaagcatttgaactctccccactcactccctatcattttttaaaaacagattaactgtgtacatggaatctgtaggatatactcataagacaaatctcaggaaatccattgtttttgaaatcaaaaagaatgccttttcactaccatttttgcttgttttttttttaatcatttagagttgtgtggaattacaagtaaacaccctatcttcaccccctaacaaaactcctataagcacgctaactgacctctagacatttatcaagaaaaatttgccatacccatatttcagccatgtccaaaactgatctcctagcctcagaaatgctatcaactatatcaatgagttatgggtagtaacggcgagtaattcagtgaacacttttttcaagactcctgataaaactgtgaatccataaagcagtaaggtttctgagtcaactttacagctctataatcacacaatatttcaatcataaaagatttattagctcaaacctaatcccaccctcatataagatacaatgtcccactaaaggttactttatactgcatactatgacacaaaggcatccactcttaattaaagttgtccccttctctccaacttcctgagcctgttagccacctgcacaatgcacaggactttaaacaataccaagaagcctactctaaagcaaaacccacacagctggttaggagcaggtgtagaccaactgaactaaatcacctaggagttcatttctaagtgtttcaaaataccagatcttgcaaataaaatcaacctctatttcacttggcattctcttaaaagaagtaagattttagatttgtttcccagctattttgaattataaattcctaagactgtggaataataaatgggctataagaggtaatacaatgcttccccagtttccaatttcactcaatactttatttgcaattttgcctcaatgtacaaaacataacacacacatgcacatatatatataatttctttttgccaatatggtttctatactcaaagatagaaattaagaatcaggccaggtgcacagttcgtgcctgtaaccccagcacttgggaaggacaacatgggggatcactttagcccagtagttcaggaccacctggccagtatagtgagacctcatctctacaaaaaattaaatcattagctgagcatgatggtgtccacctgtggtcccagctacttgagagactgaggtgggaggatcacttgggcccagaaggtggtggctgagttgagccaagattatgccactgcactccagcctgggcaacagagcaagaccctgtctccaaaaaaatcaataaataaataaaataaaaaataaaaagaatcacaaactcctaactcctttccttctctaaaaataaagtatttcagtaaattttttctagcaagaacatttttctagcaaaactcctctgaaatgttttctctattttgttttcaagaaaagaatccaccttaaatcagagatcatgaaattttttaggacgataccagtcattctggtcaggtggccatatctaactaattgctttaaataaaaaatgtcaagtcacttgtcatgttcttctcttgacaatacatcatactaactgtaaattgcttccttctatacatttcctcttccttcctcttttctttgtcagtttcagttgtggctcctattgtggaattcattcaacgagccaaacatctacctttccaacacaatttatcttatttcctcaaaaatctgccacttagtaaaacactaatcattgtctatgcttatcctaatgctatgaaaagttgccactgaccttattgcaaacacttgttaactcactgagagacaatgaagtttaagctgtttctccatttataaaatggggatggaaacgcttgagagatgcactacatttcttgaaatgcactgtcatgagttcacagaacagtctttctcctctgcctccctccaacccatcatatccacagaccactgcagctgtgttacccttgtcaatttatgtaaacttttctgatcctgagtagtttgaatgtaaaaataaagggatggggcttgaggttggcttccatcttctttttccaattatgtttccttttttgtccaattactaggccaggatatcccattactaagtttttatttttcccataagataaaggttgtttactctgttttactctgcctcaaggcttaaaaatgggctgagcaacttataactgtgatttcttaatgaacttcgaagaacttttaagaaaagctgaatgtgggaagaatgtaaggcatgttcatctgcaaccaaaagttgcttcattctactatcatatatgttctttaaggcagtagttcccaacctttttcgcaccagagactagtttcgtggaggacaatttttccatggaccagagtgagggggacagtttcaggatgaaacgattccacctcagatcatcaggcattcgattctcataaggaactcacaacctagctccctcacatgcacagcttacaacagggttcacactccaatgagaatctaatgccacatagcagatctgacaggaggcagagctcaggcagtaaggcttgccggcctgcggctcacctcctgctgtgaagccctgttcctaacagactgctgaccgtacctgtccgtggctcagggattggcaacccctgctttaagggcaagacctgtgtctgattttttttctaattctccacatggctttgtacatagtagatgctcaataaatatagtttactattttatatttagtttcaatgctgaggacttttggagatcaggaaccttgtatgagatcactgtaagtctaatgctctcctaatggtatagcaaggacttggagtcttaaaacccattttcaaatgtgctactaatttctagtcttgtcaagagacaactaacccattcagcaactaattgttatgctaaaaattgcctgttttttgatgttagtaaaatccaaaggctaaaacacatctaaatctatccatggtttctatttttgcatttcttattttgtatttacagtgaagacatccaatatatcaattttatgacagttgtccttatggttgctgtaatttcaagtatcttaatcattatacaacactttatataacacataaataggttagggaaataacccaatatccttttgcagattaaaaaaatcatcacagaaggaactagaagagatgacgatgcttttttaaggatggatcgacatttcaaatgatgagaatcaaccaatcaactgagctacatacatctgtttaaaaaaaaatcaaccctgaaaatatacactaaaattttgcaaaaaattagtcacttatgcaaatatatttaggtaatatatgtacatcttcatcattaggtaagatttactatgtacattctatagacattttaatccattaatccttacaataaggtagttattattgccattttagagataagaaaactgacactcaaaaaggtcacagaactgaaactcaaacccagatttgcctagctctgatcattacattttatcatctaagccatatggaaactgatcaaatgaccaacaatagtggaaggttaggtaaattaggttgcatttagaaattatgctactattagaaattataggctgggcgaggtggctcactcctgtaatcccagcactttgggaggccaaggcaggtgggtcacccaaggtcaggagtttgagaccagcctggccaacatggcaaaaccccatctccactaaaaatacaaaaattagctgggtgtggtggcgtgtgcctgtaatcccagctattcgggaggctgaggtaggagaatcgcttgaacctgggtagcagaggttgcagtgagccaagatcgtaccactgcactccagcctgggagacagagcgggactccatctcaaaaaaaagaaaataaaagaaattataaaggtagtttttgctatcaagatcactatggaatattaaactcttccttggctgaacactttgcatacattatctcatttaatcttttcccgacaactttttgaagtaaatatttctattatcctcatttcagagacagagaaacagaggcttaaggattaagatgactctacctgaaaaacagaggcttaaggattaagatgactctactacctgaaaaatagcagagctggcaaagaaaaccaggtgagcttgaccccaaaagcccattttcttaatcattacactgtattattactcagtagctgcctgatataaagttggtagagggcctcgaataattacaactccttccttctgagccttgcattaaagaaaatgagaccacaaaagagtacctcaaagttaaaatgaatagcactggtattagtggtctctgcttyaggacaaatactttctcatttgattcaaaatagtgtttatttaaaccatagaaactatatgtatttcttctgtgtttttctaaaatgttcttaatttttaaaaatcaagttttgcccagatttctttttatctgtacaaatagtgaattgtgttgccattgttgctagtagtgaaagagttaaatcctgagggtacaccctgttgggtatctccctcaaccatctaaagaaagaaaaaaaaaggtcacagtcagttactcccattagatcagtgttcataagaacatctgtaggcacacatacacactctctttacagtcagccttctgcttgccacagtcatagtgggcagtcagtgaatcttccccaagtgctgacaattaatacctggtttagcggcaaagattcagagaggcgtgagcagcccctctggccttcaggtaggtctgataccttcatttctaccaaagctaaaaaatgggagcctatgttagtaaactttaagggaatgaagatgccacattttggcagtgtgttagtcacaagtggatttggtgtctagatagggaagggatgagtagaatttggaaaatgtggggctttctgttctctggctgcttcagggatttaattattaggcctttagagcactattattaatcttcgtacataaatcgttctctggcctaagacaggaaggaagacctaatcctggttttactgccagcagaaataaaataatatatgcctcaaacctgattaacagtgcaagatactgttattcacacattaaatgcytgaagttacttacatgaggttacttgctactctggagcaatcaagaaaacatggccagcacggatcagcaagatttaatgtttcacagtacagtatctttctttggaaaagaaaaagtcagttcagatattaggaactataaacccagacctcatactatgagtcctttcattatactcaactatgccctagcatcagagagaataaatgaaaatctccctgctgaagaatgttagcatggggttgggaaaattgtatatatttattggtcctatatttctgtcctttacaaagaatctttaatgtgttgaccttgaagcctccctcagctgaagaacaggatcttattcttttaaatctgcctgtttttatgtagcctattaaaaggaaaagacttcagtaggttatttkagatatagtataatcatttaaaaactctttttaaaaaccaaggtgtgactaatacagtcatattgaaactatggaagagatacaatggtctactccagtgaaaaatatattcaagttgataaagcaaaatttcaaaaaccaaatgtggcaaaatcatgtgaaaacactttcaatgttcctgtttattctttaaatgcatacatcatcyggttaaagtgagtaatctaaaaatyaattactcacacttgaaccatgttacaagaggaggtaattcatcttagcaataagaaactttaccactgtttttagggccttgaaattatgaaatgagccaaaagcagagcatcaaagggaaaacaggtcaaaagccctgtttcaaaaatctttaggggcctagactaagctacaaaaatggacaatcctccttaygtcttgcccaagaaaatgtttctgtgtaatctacaataatcatgttttcacttacgagaagccamaattcctacagcaaccttaaaatgaaaccaagaggcgacaataaaaacattgctttaaaacaactgttcttgaaaaatccctttggatctggaatccattaccactgtatggcttgccttgtatctcaataacagtcatcacaggtgtttgaaacaagcaggccttggctttggtgttccccccacccaaaatgggacaactctctgatcataatcactcaggctgagtgtaatcacctacagttttctgaagtgagggtcaataatgtctccttttagtttctatgaatagcatttttcatagttgctcagatgccttccctcatgtaggcttgggtaggccatgatataaataaaacactgcctagattattttataagcagggcagtttgctgaatrtacaactgagggagacaggcttgttttcataactttgataataatccttctgagacaccatttcctcacctgctttaataacccaccagataattgttgaaagatcacccccttacgagtctcccaagtakactgaaaataataactacaagagattatttagcagtaaattacagctgatctacagaagttctttaaagcaaaaaaaaaaaaaaacaaaaaaaaaacactaccatctcattagagtgaccagagattctaaatagtccaaggaatctttgcaggaggaataaagataaattagataaattatagtatcaattaacatttattgagtgtttatgtgccaggcactgttctatgtgatttacacgtgctatcccatttatttctcaaaacagcccagtgaatatataccaagattatccccagttagacaaagggtgacaagaagaataaaatattaactatcttctgttaataaattaactactaccagcaccctcatcatatatgtttatccaattcttttagttcaaatgtttatctgtctatacccactgacctgattcccatatcctaaagccccttctcatcctctccaaccttatcaactgccattactggcaggtgcgtatgcactagaccttatttttggtaaattttaaaataatcataactatcgtctactatatgcaaatccctgttctaagtactttacgtatattcaactattaatcataactgacatcaatatatgaggttggtaaaattattatctcagttttcagatgaggaaactgaggcacacagaggttacataacttgcccaaagtcatgtagttagtggcagagccaggatttgaatccagccagtaagcattcagagtccacactcagccattgtttatactgcttttgaagcatattaagaattaactcttaaaagtcaagaaatctgtgctatgttttgtttcctttaacatttggtgcacaggacatcacactgcaaacacggagtgtattccacaactctctaaggtaaacaataataaaatagaaatttatcaagcttccttcatctagtaaatattctttttgttgtaacacaagtatgaaatcctgaataattcaaacacttctatgcttagtccctgcttacttactacagaattattaaagaattacccaaaagttcttggactggaaagatgtgaaaaagccactaactctattttcctagaatgaagatgaaaagaagatgtgtttaggaaccttctctgcttccctaaaagaaccctaaaaacaggagtaaaaacagtgaagaaaacaaaggaccttcaaagtgcactcgttaaaacctaataactgtatttctattactaaatgtagaagtggtaaacatctttaacaggcaatgtctcccctgcactctagggattcaaagatccatctttcggttctgtaagacagtcacggcttttgtaacctcggtgcccccttcaacctcccgccccaagcacctccagggtcgtcaggggtgtagttttgagtcgcgctcctaagcatccagacaggcaggacaccgtaacgacatctctgccgggagtcccttcagactgcggtctccaggtaaccgcactccaacagaagcagttgtgcttcctatcgggtcacctgttcaaaagtccccaggagaggctccagcaataccagggtagcggtttgcccgacaccgctccgggcgctgcagccttccggcaacccggacgttgggtcggtgtcagccactctcacctcccattccctagttttcctcctttgctcccgtctagtcacttcgcaccttcggctagtctttattcacagacacattscaggagtcccctctcccagagcaacaaagacagatttccaaagctacacatcccagagagaacggattcttgggaaatgtggttctttcagctgacgcatggtgactctttacggaaaaggactacaattcccagaaatcctagggagcatatagtccgtggctaaaacatgtcccagctccttggatggaatggcagtaaaggttctgtggctctttactgacctaactccttggattttcctcattcagtcccactgcaagcgtgtgggaggacttaaaaaaatgctattcacatgtgaaggaatctaaatacgatgattatatgaagcgatctctaagtcattttattttataattctttcagacaaaaatctacgtaccatcagaaactatgtctctgcagatggtaacagtcagtaataacatagccttaattcagccaggcttctcactgatgaattttgatggacaagttttcttctttggacaaaaagkctggcccaaargatcctgscccactggagttttccatctggatgtaaagcataaccatgtcaaactgaagcctacaattttctctaaggattcctgctacctccctcctcttcgctacccagccacttgcacattcaaaggcagcttggagtctgaaaagcatcaatacatcatccatrgagggaaaacaccaaacaatgaggtttcagataagatttatgtcatgtctattgtttgcaagaacaacaaaaaggttacttttcgctgcacagagaaagacttggtaggagatgttcctgaagccagatatggtcattccattaatgtggtgtacagcygagggaaaagtatgggtgttctctttggaggacgctcatacatgccttctacccacagaaccacagaaaaatggaatagtgtagctgactgcctgccctgtgttttcctggtggattttgaatttgggtgtgctacatcatacattcttccagaacttcaggatgggctatcttktcatgtctctattgccaaaaatgacaycatctatattttaggaggacattcacttgccaataatatcyrgcctgccaacctgtacagaataagggttgatcttcccctgggtagcccagctgtraattgcacagtcttgccaggaggaatctctgtctccagtgcaatcctgactcaaactaacaatgatgaatttgttattgttggtggctatcagcttgaaaatcaaaaaagaakgatctgcaacatcatctctttagrggacaacaagatagaaattcgtgagatggagaccccagattgraccccagacattaagcacagcaagatatggtttggaagcaacatgggaaatggaactgtttttcttggcataccaggagacaataaacaagttgtttcagaaggattctatttytatatgttgaaatgtgctgaagatgatactaatgaagagcagacaacattcacaaacagtcaaacatcaacagaagatccaggggattccactccctttgaagactctgaagaattttgtttmagtgcagaagcaaatagttttgatggtgatgatgaatttgacacctataatgaagatgatgaagaagatgagtctgagacaggctactggattacatgctgccctacttgtgatgtggatatcaacacttgggtaccattctattcaactgagctcaacaaacccgccatgatctactgctctcatggggatgggcacwgggtccatgctcagtgcatggatctggcagaacgcacactcatccatctgtcagcaggaagcarcaagtattactrcaatgagcatgtggagatagcaagagctctacacactccccaaaragtcctacccttaaaaaagcctccaatgaaatccctccgtaaaaaaggttctggaaaaatcttgactcctgccaagaaatcctttcttagaaggttgtttgattagttttgcaaaagcctttcagattcaggtgtatggaatttttgaatctatttttaaaatcataacattgattttaaaaatacatttttgtttatttaaaatgcctatgttttcttttagttacatgaattaagggccagaaaaaaktgtttataatgcaatgataaataaagtcattctagaccmtatacattttgaaaatattttacccaaatactcaatttactaatttattcttcactgaggatttctgatctgattttttattcaacaaaccttaaacacccagaagcagtaataatcatcgaggtatgtttatatttattatataagtcttggtaacaaataacctataaagtgtttatgacaaatttagccartaaagaaattaacacccaaaagaattaaattgattattttgtgcaacataacaattcggcagttggccaaaacttaaaagcaagatctactacatcccacattagtgttctttatataccttcaagcaaccctttggattatgcccatgaacaagttagtttctcatagctttacagatgtagatataaatataaatatatgtatacatatagatagataatgttctccactgacacaaaagaagaaataaataatctacatcaagtttgacatgttttcctgaattacttgtatgcattttctttaaggatttcccctccccattatatgatgcatgaatgatgtgccaaagtcagtcatttgaactaattatttgtgagaattttcatggaaaactggagcccattgctacttagtactctggaaaaaggaagtgagtaagaatacaataagaaaggaccaccaaataaatctcatggagaagaataatattatttcccaaaataatgtaagtttaaagaatttcatgacatttacaggcagaagatttaaatggaggaaaagaaatgtatttgtgtgagtgtgtgtgtgtgtgtgtgtgtgtgtgtagttaacatgtggagattgctgccagygaatattataaaatcagtgatcttgccaaggtctaattagacactcgctaggatgaaactagttaaaatgactgttaattttaagggttcaagacatcagttgataactagatgaccttagaaacaaatgtctttcctcctgaaatattttccggaaaaaaaaattttctggaaaaaccttatcttaagagcttcagccacagttacagtgaagactcttactcytcactgaaagtctacagtgtgtaaggtacaactaacaaatttacgggaaacatgaattatgcaagagatgaaacgctggagtacaagttcttctgctgaaagttccatgtccccagatactgaaattaactttgataaactgaatcatattcactctgtttcaataatgttgctcgctgaatattcctgttgaacarttgttgcacattgatttgatcttttgttgtttccatcacctatataaaaataataaaatataaaaatcttctatttatattgatttactctaattattaagatatgttacctaaataacggcaaaattaaactaattttttcaggatcactccactttgatttttttttctatttgttagtagaaaatggcacaagttggagcgaaaatatcctttacagagtccaaaagtgaaatttccccaaggagtaggtatattctctcttcttgatttgtctgcagtgatttggtggctaaagaattattaccacatatttattttgtagccaatgagatccagatatggtaatctaagtgattcagttgtgaactcactgaatttcatagtcaaactcagatctcaccagtatagctgcttttgggggagggtgtgtgtgtgcgtgtgtgtgtgtgtgtgtgtttcaagagcatgcagattggttatacagattatatatttgagtacaattaagtcttttttatgtcatctcagcaatcagtttattcgatgtgactttaagataacggtcactgcttttcaaataagctgatgcaaacattcaaatgagccatgttagaagagcagacacctatttcaacaatattgcctttgcctaaaatgtttcagggactcacatttcaatcaatcaccttcagaatccatgattcattcccttgaagatgttcaacagctgtacctctttcttcattaaagatggatttaatttctggaaacagacaagtgtcatttgaaatctagcagagtgagattttcagtattacactaccactttaggtcaaaaacaaagtgtgaatacaagctaacaaaatggattttctgatatggcttatgaatgggttttaaaggaaagtctcaaaattgtttgcacaagactacaggagtagtatcaagaaataagtatatgacttcccagggtaatcattttaggggactatacacatctgtaagtacaggtgagttcaatgtgttaggggaaagggaaagtgtaaagaaaaagaaattgttattccaaaggctctggggagagatgaagcttgctacttttgaagaactgaaaggtcagcctggttaaaacacagtaaacaagtaggggtggaatggcatgagcccagagaggcaggcaggggccagggatccaatttttcatcagtaaaataaaatcatattctgctctgcccatatagtaagcagttataagggccaagcacattattataaactgaaaaataatgtatactcttgttatacttgtgttcaaaaacatagtttcattattctctatcattgtgaaataaatccagacactctgagtaaaaattatttaagagggtatttgccagagattttaccataataaacatacataatacacattccaactgacaaatacaaaatctagatgacacatcgtcaaggactacataaaaatattttaggtagcctgatgggaggaagactaatggtcttgaattatggttaataagaggattaataaaacaatctagattagaagatataattgatggtatgtgatctcatcttgcattgaaagtcaaattataagatcagatttgtcagaaataatactctttttggtagaccataaattgataaaacgaagaacttgaagtttggtaaagagataaatcactcatttagcatagtatgaacggtccattgacctgttccctcctggcttatttcttagccccactactcacttcgcactttatactcaatttccaaaatgccaaactgataacactcctagtgagtacccctggttgtttcaaaccccagggcctttgagcaagctgttccttctgcagagaatactttccctcttgcactttgcagctcctgctaatgccctggtccatctggcccagttctattcactctttacatcctagtttagatacctcctccctctagaagccttctctgaacccactatcttttacagcttacatactcagggtgcaagaaataaacctggctgtatttttctctaactcagcttacattgtattatgcatctctttgactgtatgctggaaatacaatttcaacaattttagagttctacctatttttacccaacctttcatccaagttccagggagaaatataatgctgagttgtcaggagaggggtgaggaagggtgaagtgtctggtccttagggtcatcattcctcctcattaacttcagctacaacatccattgccattatcagacttggaggatgatcctgaattgcagcccagtcttcactgcaagtcgtccttatgtctagccctctctatgctgctttctgggtctctggtgggctcacatgatgacaaggagatcattcagcctcttcctttcccagcatggccaaatggtctctttgggaccatctaggaaattgtctatttctgtacctttcttgggcacatcttactactcttgcagctttctggaccacagattctcgtccgaactatcactggctaaacacacatcactaccatttcacctctggatgttactgctttcctgggccctatcacggaagtaagatgcacatcctcactgctcctgactcccagaaactaatctgggattcctattgctctccccaactccacagctcagcccaaggtatattgtacaaagagttcttttccctgggacccacattgtctactcactccatctttgtctcgaattcacttctcaaaaatctttatctaggtatggaaacagtttcttgtcatcatgcttaccaaatgcatatttattgcatgaaagaatgaatactgaatgactgagggcatgacagaatagctcttactcatcagatactcttcaaaacataatgctaatattttccatttccccatgaagcatagactattttttctttttctttttttttctttttctttcttctttttagatttcttttatttagagatggagtatcactctgtcacacaaggctagagttcagtggcaccatcatggctttctgcaacctctaactcctgggctcaagaaatcctctgacctcagctcccgagtagctagagcttcaggtgcataccaccatacccagctaatagttttattttttgcagagatggggtctccatatcttccctaggctaatcttgaactcgtggcctcaagcaatcctcctgtctcagactcccaaagtactagggttatgggaataagccaatgcaccagctcccaaagcatagacttttcacactcaaatcttgaataaaagaaagatctaggaggaaaactagtcaagtactatctcacagtattatataacacagggtccatcacatcctccctggtactgcttcaacatcttgtaattatttctgttgttacacctaaatgagtaaaaaagtactacttggtaagtattctaagtgtctgactcttctaaacaactatgcatttcatgaggactagaacaatgttttttattatttttatgtcaagtacttaatataatgcctggtataccttaggcaaagtgttgttaagctgaattgaattaaatacattactgagttgcatctgccttttattgtgagtaaccaaagtgacgtatcctttatctagcagaacactaattatactttgttacatttgttataattacttataacttctcttttcctcttcttatctcttaattccatcatgacagatatcttaattgtttattattattgaatctccagtatccagcagagtgcctagtgctaaatatacatgtgtttatatagatattgcatagatatgtacacacacacacacacacacacacacacatatatatatatacacacacagagagagagagagagagagtaaaagcttaaagcaactaaagaagcaagggatatgagcttaaatgaaaccaacaaacttctggctgatggcaaaggtaagaataggaaaatatgtattaggataattaacactagctgctgtaacaaaaactctgaaacacttcagtaagtcgtttaaagtttatttcttgctcatggaaaatccaatgcaggtgttcttatcaggttattcacctgagtgactctcctccaagatttgtctcagggatccaggctttttctgtttggcaactctaccatctttatctccatcatgtgtcccccaagacttcagatacaaaaagaaaaaaagaaagaaagagaaagagaaaatgtggggaaggcacactcacttgtaaatgtttcagcctgcaaatgataaaatcattttctctgactttcattggcaaaagctagtcacatggccccacctagatgcaaggaggctgggaaatgtagtttaactatgtgtctataaaagggaactgtaagtgacaagcatttagccagcatctgacacagtatatattttaaacatcccaactgcaatagccccatttaccctgaaatagtaatgaatggtaccagaatagctcttgtaagctaaaacaaaagtacatgctgtgtgatatggtttggctgtgtctgcacccaaatctcatcttgaatccccatgtgttatgggaggaactggtgggaggtaactgaatcacaggagcaggtctttcccttgcttttctcatgatagtgaataagtctcatgagatctgatggctctataaggtggagcttccctgtacaagctctctctttgctgctgccttccatataagacaagaattgctcctccttgccttttgccttgattgtgaggcctccccagcctcatggaactgtaagaccattaaattctttttcctgtataaattattcagtctcaattatgtctttatcagcagtgtcaaaatggactaatatacacactgtgtatattcattgccactgcttttcttaccttttattaccttttgcctttactatttaaacaatctcctaactggtctccctgccttcaccttgtctccttccaatcctctaactgtactgagaccacaatgaacattcaaaaataaaaatctgatgtttcactgatgaaaactctttcatcagtgctttcccatcttccatgagaaaaaaaaatccaaatgtctcactaaggcaaaatatgattctgtaggcccatccttccctctacacacacactgctagtactcattctctatcaatgctggaaatcctccacctgaaaagtccttctccctggttaataactatcatctttcaagatttagttcttctctgtaaagcctttcgtttaaaaagtgtggaatattcacctctctatccaaaccatctctttttatagcacctgtcaacttataaacatttatgtatatgcctgatcttcaaatagagaagctatttgataatgggctccttaaaagaaaggaaagtttctttctcagttgcatgttcttaacagaaggcatagcttctcatacattatagttgctcaatgaatattcattgaattgaattacgttcactctatagggactgaaatttattcacttctgcagctattgtcttactatctttctgattctttaatacatgaaggaggagctgtggaaataaactatgtgttccaaatatcttgatcaattaaaatatctcacagaacttggaaatcaaaagtacagcaaaattcacagaaggagatgagctcttaggttatatttattctcctttctggtgaaaagagatcacacaggattaaaatagatatcatggtaaattttaatagaatagacagccgttgtaatacacagtgacaagaattccaaattacttacatgccacaaaactccactctagcatagaatactgctttttgacttggactttaccatagatgatagcacatttttcaaacctaattctgtcaacaaacatctaacattgcacacttacttctaagaaaagcaattcttcatcctgtctccagatatcaatccaaaaaaaatgtgtgtattcacttaaatcacaatttgtgag

SEQ ID NO: 93480 - DNA, 42782 bp, Homo sapiens
tctcaggataaatgagcagtctggatgccttccactccaccttctccaggaagcctcccagactttcccaaccctgactaattgttcccctacctgatcacttctcctccacgtcccataaatgctgttgttcctttggggagactgttgcccagccatagtgcctgtcccttgcctggtgctttttatcttctgctctcctggtcattccctcttgcccactctcttaaaactttagctcctggctccatggccttcacaccataactgccattcctcctcacatcctggatggctttcctgttcacacagaggacctatccagtgccctcttaatctcttgacctcatattctccaatgactttctcctctatgcctccccatcatgtcctggcattgtcatggccctaaacttctccacctcctgaactccttacttcagatccagatctctgacccaattcctctccttctggtgtgacttggtcttgactccttgacttttccagtcctttggctcctgtcctttctctctgatcattcaccgtgccacctcacctttgccaaagctctcaattcctttgctcctctgccctggtaatttcctcatttgagctggcaccacagtgggcagctgagctgttggaagaaaccacacaggagggccaaagcgcaccttaaaagttcacaggcaccagcctcaagtggactgccatgctgccttgctatctggctgtttctctggtcatcacgaccctcccaaactcctgcagtgactgtcataccttctccactctcttcaaatctgtcatctctccttgccctattgctagcctcctttatgtcacagagttaagaggaaatcatcaggtggaaagattcaactatctctgtgatggcagcctggctcagtcctcctccagcctccttcctcctgttataatacagaaggtggcccctgcctcagatcagcctttccacccacactctggtccatccctcccatgggcacaggagcctttgtgctccattgtcctttctctactgtaccttcatcttcctcttctctgtgggatcctccttatttgcatttaaatatactgaagtaattccatcctaaaaataattaaaatacataaaccaaaataaacccactgctgacataacattcccctccagctatttctctgacttttcacagttaaacctttcaagaattgtctgcaccttgtgcctttcatttcttcacctgttgctcatgcctccatccactccagtctattgcccatccccttcattccaccagccgctgctctgtaaaagtcccaacgacatcaaggtcactaactccagtggatgttattcaactttcacttcacttgggtcacttagcctttttttttttttttttttttttttttttgagatggagtcttgttctgttgcccaggctggagtgcagtggcctgatctcagttcactgcaagccccgcctcccgggttcatgccattcttctgcctcagcctcccgagtagctgggactacaggcacccaccgccacaccggctaattttttgtatttttagtagagatggggtttcaccgtgttagccaggatggtcttgatctcctgacctcgtgatctacccacctcagcttcccaaagtgctgggattacaggtgtgaaccactgctcctggccagccatttttaaaaaaagacatgggggtctcactatgttgcccaggctggcctcaaattgggctcaagctatcctcccacctcagtctcctgagtagctgacactacaggtgtgtgccactagacacatcttttgtcacccattttgagtgctgttgactactgcctcctgcttagagtgcttttgtccctggactctgtgacccccacctccccaaactcctagttttttctttttttttttttttttgagatagagtctcactctgtcgcccaggctggagtgcatggtgtgaactcggctcactttaacctccacctcctgggttcaagcgattctcttgtctcaacctcccaagtagctgggattacaggcgcctgccaccacgcccagctaatttttagtaaatatggggtttcaccatgttgtccaggctggtctcaaactcctgacctcaggtgatccacctgcctcggcctcccaaagtgctgggattacaggcgtgagccactgcacctggccaagctcctggttttcctcctgcctctctggctgctcttccacctcctctgccagaggtttgcctctgtctggcccttagataagagttcctcaaggctcagtggtaggtcctcttctgatctaattgtacactctcataggagcccacaagcctctggtgacttcattaccactgccacaccagctattccagccccagcctctcctcagagccccagaccctgcagccaamcacctgttcaacatctccacccggacatctcacaggcacctcaaacctactttgaccaaatttgaaccttgagagggttctccaactcagaaaatggcaccaccatccatctggttaaagaagcagagatctgggagttttccttgattcatcccccctaagcaattaccaagtctcgttggtgtctacctctctacatttgctctactgcttaaacaaatggcccctctcacattatagcaacagcctcctaactgtcgctccattccattcttcccctttccctattccttcttcacactgcagtcagagtgatctacttcaaaatgcaaaattgagtgtatgactcttgtttcaaatgtctcaggataaagtccaaactctgtaatgtggtgtactggccctgcgtgatctaacccctgcctgcctctctaacttcctcctcaaccacttcttcctttatagtctgaaccagccaggaactcctcatggactccccagatgatctcaccaccttgcactccctgtggcccatatcacaattgtaattaattaatagtgcatttaattgttaagcccctctctccagctagactgtgagctccaagcagggagtgtgtttgccatgttcaccactccagcgcctagtcctgtgctgcatctagaggatggccagtacatttttgttgaataagtgaataacacatctctgcctactgatgatggacctgggtcccaacctaacagtagggactatagccaagcgatgtggaatctagcattgagttactccccaaaagacacaaggtaactattgtagatatactcccaactgtgttaaagccaccatggagaaaatgcccttatttatttgagacggagtcttgctctgtcgcccaggctggagtgcagtggcacgatctcggctcagtgcaacctccacctcccgagttcaagcaattctcctgcctcagcctgccaagtagctgggactacaggtgtccaccaccacacctggctaatttttttgtattttttgtagagacggggttttaccatgttggccagggtggtcttgaactcctgacctcaagtgatccgcccaccttggcctcccaaggtactgggattacaggcatgagccaccgtgcctggcctaagaatacccttatttttaaatttcatggcctgggcagccttgggcagcgagggacacaagcttaatttcctagttggttgccagctgacattgtagcagctcctttactataaactccttggctggccgttcttgcaagcatgtctgtggctacagggagtgcatttaaagggaagacacatatgcatggaaacaatataccaatctgatggcacagaaaatcttccttagatgtccgctttgtctcaacactgcatttaaatatcagacagcagcctagagatatctttatttaaacccaggaacatggactcaatattattttgatacagaatgaagacatagacttcatttattaatttatactccctagagttctttttttttttttgagacagagtctcactctgtcacccaggctggagtacagtggcacgatttcggcttactgcaacctccgcctccctgagttcggcgattgtcctgcctcagcctcccaagtggctgggattacaggtacatgtcaccattaatttttgtatttttagtagaaacagggtttcaccatgttggccagacaggtctcgaactcctgaccttgtgatccacccgcctcggcctcccaaagtgctgggattacaggcgtgagccaccgcgcccggcctctacttcctagagttcttagagaatttctagcttctgtttctttaaacatgttttattagctttctaaattatgaaagtaaatacaactggaaaaatacaaaatccaaagtcaagggagtaaaaaaatgtaactcccttgtttcccctccccgcgtaaccgtggttaacagtcggtgtgcacccttacagatgttttttctatgaaaatacaaacattcgacttgtttcttggactttacctcgcagtccgaggagaatcatgtgaacagcatgaaagcagcatggtccgaagactgcaaaccataacatttccatatctactgactctgaattcctgtttctagaggacccgcacccacgtggctctgtgcatccgcagcaacttggtctttcttcctttgctgagtttggttaagggaaagggccgattattgagtgggctcagttcacaggtgcctgaaattcctacttagcaatgttcctttccagctgattccgcctccgagagccttaggaaaaaatgctaacagttaggagcgaagcgtccttaattgctcagtccaattatctagatgggtccaggttcggtttcgattcagagataaggaccagggggcggggacgcttccaggtgagcccctggttaggcttgcctccccgcggagcgcacgcgggtctcgctggctggactgggcctttcaagaccaggtaacttctccatccggtatcgccaggcttacctgggggcctcagaattgtgtcagctgcgtctctgagtcaccttggaacccctcgaaggagcgcggggctaggagggcgcatcggtgggcccggggaccccgctgctaggtgtggttggcgccaaggccgcctctggccggcggagccctgcagtgtccggagggtgcggtcagagtccggccctttaggccttgcctcggtatccgccttgccccttgggccgcggcacgggttcgggccgagcgcccggcatcttgcgtttctggcttcctgagacgggcgtgggacctcgaggaaaccactctgcatgaccccacgaagagaactaaggaccaccccccacccttcctgtcctggacggcttcataagccagaggatccagtggcagtaccaagcagggcaccactctgggtcgtgagcacctaagaggtggagcaaaggtcagaccccagggtggcccaggcctccctcccccgcctccccggcggggccattcctcacccgccccagcactggagggggcggccggggtcggtctagttccggttacaaactggacagaaaaggccactggagtctcgctaggcgatgcgcctagtcccctagcctcagacgaaccgcaagaggggccacccacaactggaggggcggaggctggagctgagtttcattagtgtttttggagctgccaggcatttccaggggggtcgccttcctagaggccccctttccccagcttaaccctcggctttgcaggagggtgcgtgggggctggagggtccctggaagccgcagggagcgcgggcccgggtgggtcctggtaccgggtggggagagcggaaccctcccaaaacttggggcgcggggcggggccgtcgggcggtgacgtgaggggcggggccgggccccattggcgggcgggcaggggaggggcggggccgggcgcccgcggcggctgctgcgcctggaaccggagcctggagtgaggcgcagcggcagcggcagcagcggcaacaagtgccggaggctagcagagccaagccggagcagtccctgccgccgacaccgccgggccgcccgtccggggcgccgcgcatggagcgtgagctgcggcggtcgccgggctgagccgcgcggagcggccgggacgtggatgtggccgcgatctcccgcccttgcccccgccccgccgagctggagctgctcccggacaaggtagggcccgggcgccgagcacccccgccggctccctccccgctgccctctcaccgccaggcccctctaccagtccccttccgcctccctgcttcccggccccaccttccggacaccctgctacccccgcccggttcctcgccggttccggcttcgtacccgcgccccggtggaggaagccgtccctaggtggctcctgccgcatttaagcctcccttaccttcccgccgtcccagccacccaacctcagcccagagggagaggagagggacaccgcccgctgcggggctttggaacctcccaacccattccgtgcccacctcgccctggagcccggggaccttccccctcctcgctgcaccccaacttccgggggatccggcgccggggcgatgcgggctttggcaaggggcatctggggccgggcctcctcatccggggcgcgcgggcatttcggggaggggggcgcgcgtgattcctcgctcgcacccccgcaccccaccctcgcactgcgccggcctcccgtgccgcatggggagatcaggtgttttgtgagccaaagagccgccggcagccgctccccaccccccacccccaacctctgccacttctgtctccggctcccccaaaactggtttctgccaaacttagggaaaacctttcgctttgaccttttaaaaaaaatattccacactgtttgcgttgaatgattaaccaggctgctagcccgagtcgtgggggtggggtggggcggggtggggtgggtgctgccaggccagggagcgcctgaagccggactctacgagacacccctcgtgggaaggtgggcgtggggggccctgccggggctgcgggcgcgggactggcggctactccagcacggcaggcggacccttctggaggcaataaaccgagtcacccggttaatttccaggccacggtatttgaaactcggggctggggagccgcagaactccctgtacccccatcaagtagaggagccgtcgggagactccccacaagtgtcacagcgtcaaagctcatctttaaaaatatgtacatttataacctgggttggcgaggcggcgctcttctgcccaaaacgtaggggtggttagtttgtagagtgggcttagctcacaggtgcctragctgtatccccgtggccgcctcagccaccccaacttctcagaaagattgtttagaacaattaaactatattcttttgcccttctcttgttggaaccctaccgtaatatccgatagcgaagccagttggtgaatatagaattctacttgttaaaacaaattcttccggtataattatttgtgcctctggaggtggtaaacgaggtggccgacagggccgggactgggagtgaaaaggcggggaccctggccgagccagtcccggggctccggtgccggcttatagtcgcacccatgcggatctgacagctgacccggagggaggaccggcagggcagggcagggcggtcacttcccattgtcctaactcctgctcctggttcttttgagtagagggtggttaagcctggaggaatttgggagagttttactcggagcccatgcgctcttaaaccagattagattttaagaacacagaagtgaaggagccccatagggctgtacttgagtaatttgagtaatccttttcctccctgctcagactttacaaatgtgtttatcattagatcttctgtttgaaactacttttttagttcggaatattgctttttctccctacagcaagggttcactgtttctcatttagtttttgtgcaggcggcatttgtatgatgaaggcctaattctctgtgaaactgaccagttctcacccttgccattcattagacttgattctgccacatttaattcagtgatcttgggcaagttattcttcacctgmgcctcattttacacatctggttttggggatggtggtgtttgctctgcaagattatttctgaggacaaataggatgtttgccaaactcctagcactgcaccaggagagctaagaagtgcttaataaatggtggtcattgctgtaatcaatagagaagttcctcctggcatcgacttccccttaccaaaaacagtaaccctgtggtagccttttagatttscctgtctgagactgaaatcagccacatttggcagatgcacatcagaaggttcttaaaacctaagtagtattttgaggaaaataagcatgatttgcttgttgttcaaaaattatgaatttttttctgggcttctggtgaagggctgaatatatgaaggtttgtagttttgaaaattttcttgttttaaagaaaagtcatgttttaggtttctgataaactaaagttgtgctaaaaataggaaagtagaactgataattcatagttgattttgactatactgttcagatatgtggttttttttaaaaaaaatagttgcattagtgaggcatcgttggtatgttctgaagagaaatatgcagggctttttcagctgatgcagggataaaagaaaaggtgaatcttctgtttctcaaactttgaaacttagctttaaatgtttttttcttttttttttgaaatggagtctcactctcccgcccaggctggagtgcagtggtgcaatctcagctcactgcaaccgctgcctcttggattcaagtgattctcctgcctcagcctccccagtagctgggattacaggcatccaccaccacgcctggctaatttttgtgtctttagtagagacagggtttcactgtgttggccaggctggtctcgaactcctgacctggtgatccacccgcctaggcctcccaaagtgctgggattacagacgtaagccaccgcgcctggccttagctttaaatgttttctagcaatgctagggtttcatgaaaatcctaatttagggatgctgatccacagctgttaatactcttgacatactgggtcagtgcttttcattctttctgacttggttaatggatgtagtatttgactgtatttttctgtatttttttgatggttttattggaaagtctgttagagactttaaaaattaataactgcctatggttacttttataaacattgagaccttgagatcttgcaactaggataatacttggtgatgtgtaatctattgcaacatccctgatggtggtacatacatcaccaatactgaaagattctcataaaggccttttggtctcttatgtaagtgcccaggggaaactaaagtcatttggttgcttggtatttttggtgtgtacagaaggttaaaacatgaattaaactagactctgaagtggtaaatgtttcctggctgcatccagtaaagaaaacagcacaaacacccaaaaggtgtggacccagctgtctttttctccactctctaaggtgggattgctgttcctacgtacttgccaaatatgtctgcaaattacagaatgaatacattcctctctctggagaggcaattactgtttgaataagaggtgtatgtatgtgtggggtaaggttttgggagaattgatgtaatgatttcatcatcactcactggtaaggagactttgccaggctggaacctgttacttgatggagaatttattattagggcttatgtggcacaattactttgctgctggaaaaagttatttgtactgagttttctatttgttacaaattttaagagttgagatttttgccctctgtgtgttgccctgtgagtattaacaacctctgcccaccagctttgtctttttgccttgtcttaatttttgtaacaaaaattcagatgtcttttgagagtcataacatgtatcttgtgcaattttagctttaggtattttcatatataactttaagaatgttacacattattttctgtgcatctataacttaaaaaaaacaaaaaccattttctgatgtggctacagagggggaaattcccagtagccaggaaattgatactttctacttttcattctgtggcattttaaaacagagggttcaggtgtcttcattctgatatgagtaggatgtacgtagcttaccagaatgtttgaaaaaaatgataatccaaggtaatcaattctggcatgtggctagattctgtccgagtgccatgtggtggtttagtggttaagagcataaacttggagtccataagatgaggatttttttaacttcatgtataacatgcagtaaagtgtgagaagtgttaatattaagcatgagctcatgtatgtaagctctcagattaagaaataaacattttcagtactgcagaaggttcctgcgcccatgtcttgtccgtgttcccaccccctcaccctgaaggaactgttattctttcttacatcatcatagatgtgacttctgtcatcatagatgggttttacctgttgaacttcatgtaagtggaatcagtcatacagtgtggcatgtagtcttttgtgaaataggcttgaattctatttttaccacttattgtgtgactacggacaagttatttaatctgagtctcagttacgtatgggaatgcctaaagttaaaattacacgaactatttcaggataaattttctcacttgtaaaatggggaagataaagccctatgttagatttactggggaaagtaatataaagctacacctagaatacctagcactgtgcctgactgcagtttcctcttcccctttttatttctttaacagggtgataactaaagcaactagatcttttgtgtttaaatgagctatttcattaaaagttctgtaggtcttttattgaaaattagaagacaaatctttatttaatactttgttgatatagctttagctttaagatgtattatttgttagttgcctgtttttgacatttcctctctaaagacagtcattgaaatgtcccattcagagttgtttggccacctgtgtaacatgagctaggatgcagtgatgagaactggtttatggtcaattatggagcttgtggaagagtttagtttgggtaagagtcatcaataagtgcccaagatgctcacaacatctgctttatgtttagtgaaataattatttcagaggtgaaagcacaggaccaattattttaattgcttgcttcagacaagccacttaaaacattttcagctcttgtaatcttaccgtgtaagcggtattacataattccatggcctcatgtctccttatttgtttggtacttttcatttttggactcattctgcaaatgtaacttgggtagtacttggcattctttctaaatgactttcattaaatgtttatttagaaaaagtattcaagataaagtaaaggaaaataaaactaattccaccctctctcaccactataactacattaacttgatgtgggtccttctaagtgctcatttcttcttttgtacacttctagaatgaccttaggaaaaacatacttccaatactttatggaaatttaaaacaaaatatgggcctgcttagagatgtctagcagagaaggcaagagtcttcgtaggcctaagttcaaatctgtccacactgtggtccctacttgtacctttgttagtgctgagcagacagtccccagagactccatcagagggtcccctggtctccagattacagtagccaacacggaaaacctgccctggaatacttctccattaagacctcaagatgtttggtgaagtgagcagtttgttctccgaccaaacacgcattgattgagcacttggtgtgtgcctagcactgtgcttggctgtgcgtgattgctgccttcagtgggcagtgtggtggagacagccaggaactggtaagattgccttggtagaggtgtaagccaattatgtgttggaggcagccaagaaaggcttcttaaggaagtggcctttgggcttggtcttgaaggatgtgaataacatttcagaggcagagaaaggaaggtagaagtgctcaagggattgtaggctgagaaaacaggacacaacagaaaggctcatagaggtcttttggggaaacagcaggtgatccattgggtttggagtgcatggtgcttagaaaggtgtaataggccatgatgcaatctcggggatcatgcagagatgtggcagttaatagttatggaggtagtgaggaaccagtgaaagttcttgtggtcaggggagagagagagagggtgtgggtgctgacaagttatggccaggcttgcattgaggaagatgggcctgagcgtgaatgaggcgagcctgaccccgggcaggtcattgcagtccctgcgttctctgcttcccatttgccccctaccagtttctctcagaaagaagctggagggatcctttaaaaactgaaatgacttgaggttacttttctactcagaatcctccagtcagaatccctgtcttcttcagaggaaagccagagttcaaatgtcacctaccaggactggtgatctgccctcctcctcctacctcccttctccccctcatttcactccaggcacraggcccccagctttcctgcctctggcctttgtggtgactgctccccctgcctggaactatcctcacctcttctctgasargaggttttctctgatcacccggcataaagcagcctttccttatcccctgtgcagtgcttcatatttcatctaagtgtttatcaaccttacagcartcaactctgacttggttctttgctgcctgttttcaacactgcttggtttaagtaggcgtttgacatttgttgagttaggccacttcattaaagttagtcttagtagaggggaaactgagggctcaaaccagggcagggatagtacaagattgaaatatgtatgtgtgttgtttggaagaggtgggtgagagaargactcctggtgggtgtaaaggaatttggaaaccaactaagggaggttaggagaagggccatgacacaggtatattggggcattttttagcataygggatatgggagtctgtagtgatgtctaggggacaagaatagggggtaagggaagacccagcaatagacttgggcccagaactgtggagcaagtccattttgtgggatggggccaaggagcaaaggctgccaacatgcaagagaaccctgggggttcctgagcttggggtggggtagacatggtggccagcagtattgggtgccctagaaagtcaggagggtgcaaggactgcgaagattctagaaggtgagggggattgggagggtcaaggcaggacaaatgggcatgacaaggagcatgtgcctggtgcctttggagagggagaggctgaagatgggggaaacagtggagattgctattggtgcaagaccccagaagcagcaagagctgtcacagggagtggagatcctgggagttgggggtcagggactggctgatgtagagaacttgaagtaggttttggtcccagagctgacatcaaatgtctttgtagctatggcaacccacttagctcctgtttcccacctccctgcagaatcgcatgaaacctgcacagccaatttcacatgtttattattggaatccattgaactcatgaatatgaaagtgttaatgctctgggaagatatttctatggaccataaacttgctgcagtttatttgtgcttcagaattttttttgagacagaatttccctcttgttgcccaggccggagcgcaatggcatgaccttggctcactgcaacctctttctcctgggttcaagcaattctcctgcctcagtctcctgagtagctgggattacaggcatgcaccaccatgcctggctaattttgtatttctagtagagacagggtttctccgtgctggtcaggctggtctcgaactcccaaccttaggtgatccacctgccttggyctcccaaagtgcctggtagaaattttctaattgtttattttctttgagaagcacttaacatccaactggttctccaaagtacttcttttttgagtcttgatcagggaataacacaattgtggtgagttttatgtgcatgtgtgtttttaaccctccaggtctggctctagattgttcactgggaagccgaatgatattttcagattcaaatatatttgtctaataatgaaagggtcgaagtgttacaaatgctatcctttctaaatagtcaacatttggaactagtgagatatatttttacctttattattttatggttgtctttgaagcttgtttataaggaacttttatgtaactttattcttgagatgcagccattatatttttgttcttttcctttaccacataaggaattatttccttcaaatgaacttaaaatatctctcatgaatactcctatttttaactgaatgtttctcttttttaaaaaacttttattcttcaaagttctgatggatcgtctttttttaactctttataatggaaattttcaaacaagtgcagatacagagaatggtatcatgaagcttcaggtagccaccagcggcttcagggtgatgattctttattttcatctctaccccactcacgactaggggcccatgggcaccatctagagagggagagagaagaaggtcacaatggaccacagagtgrgcagccatcaatttagagatagcggaggctgggggagaagattggacgcccccagggagagtgacaggcagaccggcgagattggaagcccgtggcactgggattgctgtggtccctcgtccctccacatatgtgatcacctatggtatatgaagggaacgtgcagagactcgtttaaaactgaggtgactcaaattgcttggtaaaagaggcccagtttttaagcagttcaatagtgcccacatattgagcaaacatgttctctttttactgtggcgacaaaaacttttcttggcgggtggccggagaaagctatgttactattgcacttctttaaatacggaagcaagtcttggtcgaaggcctgaatgatgcctccccttttatagaacatttggataaaaggccaaagtgttacttttttttgaggatacgtattttaaaatgtatatggtttattttgatacttaaaaagcaacaacttgaaaacaacagtcctgaaacacttgtcagtaaggtgttaggatttaaccagcctttgagaaagggagaagaggcgggacaggaatccgagatggagcagggagctggtttgcttctttgccgccttgctctgaagttgccacccagggtcacacatcactagaagtgttttcctctgggaggaggatgatgtctgactgtggagaagaggcagcatcccagagggagcccaatttaactggatgctcagtgtgagaggaggagcgctggcatttagtggctgtgtgccgtgggcggggcctgccagcccttggctgtcatttgccacctgagggacaggctgcttagttccagcctcctggctcacctggaaccatttctcctgggaagcatggtagccaggagagtggattccaggtggtgagggcttggtactccttttgggggatcctgagtgccaggagaagaggatgaaatcgatggactgggggaatcaaggctgtcctcatggaagaggagacaggatttgaacctgggccttcaaggatgggggtaaggatggagagaagcaagataagggatgttttaagccaggagaaaccaggctgagaagaggtatgggtggggaggatagtagttgttgttaaggggtgctggtgtctagaggcctccgggatggggttttaggggtggcctgcctggatcaaggatcagcttggacgtgctcagcgaggatggggatgcccatttccctccatgcagctctgggctgggggcggcccatctgggttctcagttcctgccctctccctctactttttctgggaacatcagacaactttctgatcctgtgaaccagtttacttctctgtgaaatgaagacacctcagtcaccacttgactgtgtatccaattgcgcccatggcatatggacaagccctcactcagctaatgggtgggcactaggtgtgcagtggttaatttgttttattataaggagtgtccttgatacctttatctcatttctctattttttttcccttccccaaagtgttagaccatgcactttaatccaacattatttttatatgttttttattcttgtagagacaggatctctctctgttgcccaggctggcctcgagtgatcctctcacttccacctcccaaagcactgggattacaggtgtaagccactgtgcctggcctagtacaacattatttaaaaatctctacacatgtctactctgcagaactttctgcactctttgtgcctgcttttggaagagcgagtcaggcagttctctccaagctgctaccctacaagactccaaatggataagccaaggagtcctgcagtctgaggttgtagtacctcactttctggtgtccccttcgctgtaaccaagagcatattctcttttaagaaaatgtgtcactggaaaccttcatcctaactaccaagaaattgagacttcccaaagcaatttattaaattacttaaaatacaatgtcatttgtataattgtgaacacttattgaagttacagaaggttatttttaatatgctatatgtaatctcaagttgcagcatgttcaatgcttttttgattttgaggttacatttttattttggaaggaagacaaatgtaaacgtttatcttgcagggaaatgttggggatgctctcaaactctacagttttgtttttttttttaagacagggtctcactctgtcgctcaggttggagtgccgtggcacgatctgggtacaccgcaacctctgcttcctgggttcaagcgattcttctgtctcagcctcacgagtagttgggacaacacacatgctacaggccaccatgcccagctaatttttgtattttttgcagagacggggtttcatcatttggttagacttacggttcttgagggacaagaattgccaagtataatttaatagaattggaaaggcagtggttgttttgaaagagtttgtctgtagagtacctgatggaagtgaggtacatccgtggtccccagcctttttagcactggggactggttttgtgaaagacagttttccacggactccagggtgggaggatatgcgagatggtttcgggatgaaactgtctcaccctagatcatcaggcgtcagattctcgtaaggagcatgcaacctagatccttgcatgcgcagttcacaaagggttcgccctcctgtgagaatctaatgtcaagctgatctgacaggaggcagagctcaggcagtaatgcttgcaggcctgcccaccactgctcaccaccagctgtgtggccccgttcctaacagaccatggaccgctaggggtccatggcctggggtttggggacccctgccatagattattcttgcctgggaaaataatggattgaatttgattgcctgagtgcttaatattaaagtgcttgttttaaaatttgaaatttctgcttctctgtgtgtggccagttatcacaccagtggaactaagtggtggggaatggtgtacttttgaaagtcgatcttatgagtttgagaggggtcatctttaaattttgtaaattggtcattagttgaattcttgtacattttactatgtaaaatgacagtaatcactttttcgtacctatgtgaaaatagtctccttgtttgtatgtgtctgtagacatgaggagcccacataacagacaacagattcctccttccttccccccttcctttcccccttccttcccccccaatctctacaccaagactgccaagactgggctgatggcctacttatttccagaagcacttgtacaaggtcacttggataacagtttatataatgggattctgtttctagtccagtaaatgtaatttatgcttgtgcgtttctattaatttttaattgccttctttctcacctcccccatccctgaggcctgtgtttgtttatagatttatttaattgtatttgtttcctgagtcatgtttttaggtgatgtactgccttgagatgacaccacgtaattgtgtcttgaggagtgaggcctagaggggaaagctcgggaattggtagatgcttaggatacttatggagaagagggccaggactggcacagagccagggaccagagggagggatgctggggaggggggtgtgtgtgaaattatccaagaatggtttgctagaacagtgtttaaaatgtttgatcaaaatggtcaaagaatacaaaatgtccttagattaggtcctggttcctttactgtccctccccttcttgttctcatattgattgtgtgttgagtggtaggcactagagatgcagaagtgaatatggcccattctgcccaggagtccttggtgtgtcagacctgttatcacaccgtgtgctaagtcagataaatgtgggtgaggtggtggtaacagcaagggggaagaaatacaagcagcccaacctgggtgggggcagtggggtgggaggaagaggtgacacattggcgcttttttggttgttgttgttgcagtctcactcttgcccaggctgggtcggagtgcagtggtacatttcagctcactgcagcctctgcctcccgggttcaagcgcctcagccttcctagtagctgggattacagacatgagccaccatacccggctaatttcgggccattggctcttctgtttttatgttgatagcccagaatggaagctatagacygtgagaaaaagactttgttactaatgataattttgactactggactggactccccagtcccctgggacacgtggtagtaatcctggttctcttccccagggcagccttgggcaaggctctgtctccctgtgccttggtctcctctgctgtaaaagagatattagagtggatggtctgtaaggccctgggaaagaaattcttggagcttctttctggtaatgaaattgggtcacaatctatgtatgaattcatgtgcatgttgttgaaaaacaagtaaaagaatgaggtaagccaggcgtggtggcacacttgtagtcccagctacaagctggtggctgaggtgagaggatcacttgagcccaggaattcaagaccagatggggcaacacagaacacaggccagaccctttacccgcccccacgccgtcaccccccacacacaccaagagtgagatggtacagttggtgggtaacgctggttctttgatccctttccttcacaggagagctggggtctggaccagccctgtgccactgtcccaaccctgtggcaggttgtaaagttgtgctgatctcccttcactgcaggctgtgatgttggagggaaggaaaagcagattttctccacctgtagccagctctgacaggtgtttaagacgaggctagtttaagccccagcagtctctcatcctttcgtatgaataatcaaaactgagtcatcacaaaacatatctgcaggggattctgcctatggtgcggaagtgttaccagaccaggacccctggatacgttaaaccattgggtgattcccgactggccattttgttgtctacattattactttctcatatcaatttggaaagaaaaaaaaattcgattccccctgcctttccttggaatggtttacatcttcctggatgggtatccacaaatgcaataattttggtaccttaattttttagaactacaactttatttggggattctcaatcctcctcgagcaacggtattgtgtggtagaaagtataagagcttagacccaaggttgggaccagagtccaaacactgactccactgggattagctctgtgacctcaaactaattgcctcacattttttagtttgttgtggagattaaatgagatgagaacatcccaacattaaaaatgggcaaagggcatgggggagtaggaagaccaggaaggaagcatatgaaaagatggcatcaattaaaacagggagatgttcttttttggtaaagattaaaaaggaggacagtggccgggtgcggtggctcagacctgtaatcccagcactttgggaggctgaagtgggcagatcacttgaggtcaggagttcgagaccatcctggctaatatagcgaaaccccatctctactaaataatacaaaaattagctgggtgtggtggtgggcgcctacagtcccagctacttgggaggcagaggtaggagaatcacttgaacccgggaggcaggggttgcagtgagccgagatcgcaccactgactccagcctggatgacagagcaagactccatctcaaaaaaaawaataataataataggagtacagtattcactgtcagtgtggatgacttcatgctcttgggtatacaacgagaggataaatcagtgtgacctttctttttggtgggaggttaagggtgagagtgaggggaatagcttgattctatgctaactgactttaaaaggttgggttcccttcgtaatatgtttcctccggaagtaaccagatgatgatgtgtctaggagggtgtttatgtgttttcagttataggaaaaatcagaaacaactcataagctcattgattagcaattgataaagcagttgggtggggtggctcgtgcctgtaatcccagcactttgggaggctgaggcaggtggatcatttgaggccaggagtttgagaccagcctaggcgacatggcaaaaccctgtctccacaaaaaataccaaaattagccaggtgtggtgacatgcctgtagtcccagctactcaggatgctgaagtgtgggggcatcgattgaacccaggaggttgaggctgcagtgagctgtgattgcgccactgcacttcaacctgggtgacagagtaagaccctgtcccccccgtcccccccaaaaaaatttgataaggcagaccacatttacctatattctggcaggggagttagagatccgacagaagacaaaccactcttcccctgtgaactgaatctgctttagagaaattaagtcttcgggacaacaaaaccaactaaagttgtaatcaatgggcatccaacttggagttcttcrttttttcccttatttcatgttcctatgtgatgtggtcagttttctgttttaagtagaggggacaggaaagaaaacacattcctccagtccatccagcagcagcatttgtgaagcagccacagcttcacatactttcttcctagcagccctgggccccaccagctcctccctgcccttctagtgtggcctcagaagctgtctgtccatgaactggctgtgtccatctctgcctgcagacrcwctgtgccgtaccccatgtcttgcctgccctgcttctctctacatttctgaaatttgccctgttggaagccccactaaggtcctgccttgacccctgctgttgactaaagggctgtcacgtatttattatctctgccaattcagtgtataggacccatgttttatacccgcttttccccaaaccccagacttaaataaaaatgttcgttgttagaaatgactctgggttggtgatgtagagatctataacttgtgccagtttttaagtattgccttcctgctccaaattcaccctcagttgcctgatctctgaaaatgggtctgggccctttaaatgttttttctttgccttttgtaagtagagggctctgaaggggaccttgtaggaggaagggatttttcttcctgatttcatatgtgtgcatgcgcatgcttttcctgcactcctatattcctgcagggcacacctttctccagcatctgttgctctgttttctgcagctctggcatcggtggtaccaggagcctaagactgggtggtccttatccaacccagatcattgcttcctacagcctctcagcccccatgtgtgtaccccaagcccccctggtgctggccatctggtgagctagccacctgatctttgtcctcagcacaaccctaagctgctctggcctagggtatacattgacgtggtaagctcctatggagggaggcctcttcactctggtccagcagcacctgatgactccctgtgtgtgcccctccttccttctgtctgcttgactgtctacacccagacttgcttgcctgtaccctagagggttgcccctgctgcttggtgactgtgggggatctctggcctaggtacccaggagtttttctgccatctatactttcttcaacaaactcagaaaaaacccctgccctaccaaattttgggagatatttttcatctgttccagggcatcctttagattgttatttcatctttatagtttactcaagtgtcatatttattgtattaaacttccctttcttagattactgtttggtttctacctgctggttgaacccagactgaaaaacattctatgcagctcacctaagcaggcagaaggatgaatcagagagaagtctttagagatttctgagggctcactgagagcctgccagagtacacttgcttgtacacaggtcctagaggttggagtggaagcatttaccaagccacgtacaagctcttaaccaagggcttccaatatgcattaagctccccaaaaagggactgcttgcattccggtgttttttttctaaaatgactgtcagctggggcaacatgaggagacctcstctctacaaaaaaatttaaaaaattagttgggtgtggtggcacatcccagctgctcgagaggctgaggtggaaggatcgcttgggcctgggaggttgaggctgcagtgatcaggcaackgtagtctagcctgggcgacagcggagaccctgtctcaaaaacaaaaaatgattgtcccaccttaggtaagtagatgcccccaggttgcaaatctgtactaaggatcttcctctagatatgcttcccatgactgtcatggccttgtaggttacaattgctggaggtccatccctctccagaaaggaggtagagatgccccattttgggataagggtgcargagggataatgggtctgctgcggaagaagatggcaccctcacctggaagcactgctcaatcccacacacctgcacacccatgagtctgctgcctttggtggtctggggctgactgtgggaaatgagggggcggctgtacttctcaccccagtttacctcttcagatcttgcccccaccctcacgtctaacatggagtcagcactgctgaaattcttatctcccctaagtctagcaagttatttaaatttttctgttaccctttagttcttaataagtgagacagttttctataaacatgtctgtaattcagcacacatgtgatttttccattgtcatctcttaggagaaagggtgtatatatatatataatctggtttctactgaacactgtgttcagtaaacttgtccagatgaccaaagtatctgttcctttagcaaatgctgggtaagtctcaggtaccacgtgctggagtgtaatggtggtgcagtgtgaagaccttgactgcggagggttcccaggcagaggcatcctgatcaggagcagataccctgactcctgggcaatgaggctggtgtttaggctggggcatacccttgggcaggwaatctctaagagaaagaagtgatgaaaccctgagttcaacctctgggaatggagaagaaaggagttctagaaaacaacagacacatagctagagttaggctctgagggaacagtagcatattggtggtggtctgggggaactgtgggaacagcatgagcagggagggtgtgtccaggggactgaagacttgggaaataagacatatttgggaacatagtgggaaaggaggctgtaggctattgcaggctctggaatagaggagagatgaggagggagctaccagtggcgtaatagaagcacctggctcctggctgaatgcgcagagcaggaagcaactcaaggtaatgtggggttttcaccaggtgcctgagaacttgatccattgcacacagaggcccgaggaagagggactctgcaaggcatgtggaagctaatatctggagttagtttgttgacccatgaaccctccttttggaggtgatgctcatggcattgaatggaggagtttgtagagagaagactactaaagaggcagtgaaggacggaactttgagaaatgtgcttcgtttagggtttggtggaaaaggcagacccctgaagagctattggaggttgtatcatcccattttacaaaggaggaaagtgaggcttagagaggtcgggtaacttgcctaaggtcacacagccagtaggtagcataaccagaatttaatcctggtcctgtcactccagatgccaaactggttttccagtctgaaaatggatctgggacatctccatcctcaaacgtctgctacccttatttttaaattgcataatctttccacctagacctaaaaccctctttagtttactaaaggcagggcagaatggcctctgggagggttaattcccttctcctcttttcctcaaaggttctgtatgtgtttatttgaagaatacttctagtggctaatttgatttgaaatgatgaatatcatttgagaaaatcggccacactgggctttcggggggttgtaatcagtgggggccagaatatgtcctgccagatgctttgatctataatgttgcctgtgggactgtgtaggtgagtagattcattataaatacgtttcccttttaatttgaacatgaaggctaaaagtaatggctgggaaccaaattccttaaatctagctgacaatagttctgtgacttacagactggagagcagaggtaraccatcatcttagctgagtgccagcctcttggtgagggagtccagggagtcctgaggctcccttgccccggtgaaaacccaggccaggcctctttccgcaatcaaggaacaagctgtaggtgtggcccagctcttctggtcccactgagctgctccactcacacccttatcactccaccatctgccagcagtgctgggagctattctctcccctagagccatttagctgcaaactgtctctgtctctgtttatccgagcagaacctggaaggggctggcaaggactaggcaacagatgggacagccagagaggtgaggacttaggtaaaccactcttgccagactcccggaggtggtggggagggaaagggcagagtgaacgtgctcctctggcctcgtgatatggcagggggcttgggctctttctgaggatttgtgtgtcctgtyggagcaggaaagtgaacaggaaccaggatgccctctagagatggaggctgctagctctgacactcctggggtttagtcagaagcttggatttccagcccctttctctcagcctgagtgggtgggggtgactggtcattttatttcacggttacaaggaggccttgcttttctttcatccttaatcttggtagtaggagaaagtgcagggcagccttggcacaggtcttgggtctggcttgtacgtattgctcgttctgtccctggctagttactgtcgggcatctttttagcttgcctgagcccatggcgggggagtcagaccctgcctgagttctgggagagagtcctcatggctgttggtggccacattcaaatgttttctggccagcagttttgcttcagtgctacagggctctcagaattgaagggaacctttttagggtcattgggttcagggattcccagtctagtgtccatgagtgaaacgttggaattgtttcagtatttgagtcctaaggaaaacagcctgtgtgggctaagtaggtattgaagacctttgctttggtcagagtgaaaccagctgaaggtcatctcatgtggatgggtgggagggaggcctgggggaggagggatcatagcttctgatttttctttttttttgttttttttaaagagatagggtctcactctgtcactcagcctggagtacggtggtacaatctcagctcactgctgcctggatcttctgggttcaagcagccctcccacctcagcctcctgagtggctgggaccacaggtgcatgccactacacccagctaatttttttttaatgtagacatggggtctcgctatgttgcccaggttggtctcgaactcctgggctcaagcaatcctctcaccctggcttcctaaagtgttggggttacaggcgtgagccatggcacccagcccatagcttccgattaatagaacggtgggacagtaggaaaatgggcgcccttgaaaaccatggttttgcatgggagaaaaaaaaattaaaaacagcctcttagctaagaaactaaggtcttgagaaattggcttccccggggtcataaagtccacgtgagtcactgtctgttttcacagcttggtaatctttcccatgttccagtacaatgtgtagaagaaactagaactagaaggcctgggcgcaagccctgactccatcacttgctggctgggaacctgggactctcaaagcctcattttttctcattttcttttaggggagagatgagtgggggctgcattttgcccagagcctagcctgtagagtcactaatgttacttaagatagtacactgcctcccatatctgatggttgactcgtagttttgtgggtgaaaatgtataaatacagagcttttaaaaagttactttaagaagattaaccatggaaaattagacacaaatcccttcagttcctgcggtcataaccatacgcagcagcgtttgcttccgtgattgtgtgatggttgaaaactcgcactctggagctatcattgcctgggtttgagtcctggctctaccatttaccagctgtgtgacattggacaagttcagtcacttgtccacccaccccgtgccccctaccctgtgcctcagcgaaataagcagtgggaatttagagtatctgcctcaaaggattgctggtgcttggtacatatttgttaaggcaggtgtgttcatgtttcactattacatgtaggagcccttaggacgtggcacaggcacaagggaaggtgtgcaggtaatagggatgggtgttgtgacagcctctatgcagcactgtaggggtcgaatacggcgatgctgacacaggctgggggtgggctgtggaacagggaaccccgcatggggctgtgtgctgtatcccggtccccagcgtgcggcggaagaggctgcttacagggcagacctttgggcagcgttaaaggatgtgaaaacaccctctcatcccaccaccctgaataaacccactttgtttttgtgtagtattttatctagattgtcacatagtttcagcatcatgtctactgttttgtaagccatttttcagctaaggttttctctgttatactgtctttctaaatattttcatttcattaaacaaaaccaactgaagtttcaaaactgttctgtccctgttggggacaaggtaaaaagctaaggttgctttgtgtttgtatatggggttttctcttatttctgttacaacagaaagtctgtgtttcacagcgagagtttataacatcttcccccagctttggggtgagttttcttaaattcttcttacgcaatgtaacttcctgctgaagaaaggacattggaattgggttttctgtctgcgatgggaatgtttagtcagatatttagagagctttttcccacagatatttttatgggggtcactgctttatcctcctttccatgaacttggctttgttctaagagcctactagaagccgagttctcatgcaagacactgtgcccaggtcacaagtgcacgatgacatttaaccttgatggaaatgtgcagttgagaatcttgttttctccaccttcctcttcagattggcttgaaagaaataccctttagcaagtaatgggaagagttgcctcaaattgagcctttgggaatctgaagtcttttacaagaaaggctgatctgtttcctgaggtggggctgggagcttgtaggtgcccccatttctctttctttggagcctctttaactatcaatgtaccatgatcccgtgccataatcagcctgtgggacttcactgttgacctggtccaggtaactagaatgtggttgagcctcatagaaaaaagagatccagagagtcctggattgggagccagaaggtggtcttgtctaagccttgtcacgtaactcttccataatattcaggcaaatcatcagtcccctctgagcttccattttctcctggtaaagtggcatcccgtgcaatgagaaatgagcaggaaaatgccctgcgggctggaggccttgagcacttaaatgaaagttgagggtggtgttcccgggaaggccattcattagtccctgtgtcttgagccaaggtgatgtgagaactgtaccttgacgtggccttgattgaggaaataaaaggctgaattgtagcagatgaagttggaaatcttgccaggggtcagcaagcttattcctcaaagcatcctcaaaagaaggattggtgttttccgtgatagaggcttcaagtggttatggctggattccagttattcatggcctctcccataatctagatgtataaacttgttaaattatctggagtcatttttacatgttattcactctgtatctttcctaggagaattagctctggaagttcacagcctcctatgtaaagtactgtgcttcccttttttcttccctaagctgtcctcttttactccagaaattttggtaaaggtctattaatgtttaaatccctttactgagttaaatttttgccaggtattaagctgttcatagtatgtgctgttttttcctgagtagttttgctctgtcacccaggctggagtgcagtggcacgatctcagctcactgcaacctcagcctcccaagtagcttggactacaggagtgcaccaccatgccttttttgtatttttagtagaggcagggttttgctgtgttggccaggctggtctcaaactcctggcctcaagtgatctgcccacctcggcctaccaaagcaaagtgctgggtttacaggcgtgagtcactctgcctggcccctttgcaaatctttttcttcattgtagtttttcaccatcacacatttcctgttgcccttccttccagactaggaagggcctgagacctagagacagcagtactgggtcaagggctcactttagcattaggagaattgtcccaagttagagagaaccttttctttttgagaagtatttgagaaataactggagttatcayggaagtctccaaaggtatgaggttaggtttttcaagagtagttttgtgggcaggggaccagggagtgggtgctgctgattggctgtggatgcaatcaaagccatgtgctgagtctgcaggggttggggggagtcatgagtctctagtctgggtggggtaagtctgagaaacattcagaagaccaatcttagtttctataatagtggtgttaactacaggagcacttggggaagtcaaagatcttgtggcctctggccacatgacttctgagcaatacgggattataaaaactgtgcttacattttagcagaattcaggcccctctcaatcctaatcttgtgacctttcattagcctcagccccctgaacaaggaagggatcagttttatggagggactgttaccatctttgcttcgaagttaaactgtaaactaaatttctcccgtggttagcttggcctatgcccaggaatgagtggagacagctagcctgtgagggtagacgcaagatggagtcagccatgctagatttcttactgtccataatctttgcaaaggtggtttcagcagtagtaaatacaagcaaccagataaaggtctactaggcagatctttacagacacacaatagcttgtgaattcctgttgatctcatctgggctctctaatatgtaatagttttacagcattctcagcatgacaaatatttttctactttaccgtttgttagaatccagtgaacttaaaaatcctctcctttcaaaaagcaaatactagattaaaatagttgcaaagctttcttttagggattggagaagtgtagctaccttttggcatggtacagacttggaatctgtttgccttggctggtattccagtctgcccttctttaaatgtgtacctcctcaggtataaaatgggaatgagtaatagtacctaaggataaattcccagttgaattaacctgataagaaaatcttcagctctttatagaacattgccatcccacttttttgggctatcttttaatgtcaccttggtttaaatgttcattcttgtataggtcatccatgtcaatagtgttagaaccttggatatccccagcaaaccatctcattactcattctttattcttccattgcccacagcctgaaatcttttgatatttcactaaaatatcatttgtatttccctttttgctacaaacaatagagatcttaaatatacacttcaggtttgacatatgcatacatccgtggagccttcatcaggatcaagacctacatggtacatttctgtaccccaggaagttccttcctatccttctctaagcccaccacctccatcactttcagatttctagaacctaaattcattttgcctgttcttgaagttaatataaatgaaaatttgggtctggccttcattcacaatgtaatgttgtaatgtttcatccacaatagtttccctttctattgccgaggggrtataccattgtatgcagatgccacagtttgatcatctgttctgttgatattgggctgttgccagttcttggctattgggataaagctgtcctgagtctgctttcattttctctgtctgagatgctctgtggttcctgtctcctgcttcctagccctgcaaccttgggcaagtgtcttaatctctctgctttggtttccttatctgtaaaatggtaggttggaaaataactcagggttgggactaacattaaaaaaaagagagagagatagggtcagacatgcctataatcccagcactttgggaggctgaggtgggaggatcaccttaggttgggagtttgagcccagcctgagcaacgtaaccagtccctgtttctacattttaaaatctcaaagtttttcaaatgaaatagaagagaacttgagagtgaatgacatggaactgcacacaatgcrtcacacatgtaaatagagttttgtgtatgtatgtgtatactaaacacagtataaaaatgtatttgttataatttaggcaaatcggtttgccaagcactgtatgtgccattgtaagcaaggaagttgaactctcctgaggttatttagtaataggtatttctagcttcagcatgtctcaaacagtcacttacatagtgcttgctgtgagccacgcgctattttaaaagctttccatataacatcatatactcacaaccatcctttgaagtgggcttgattcccattttatatatggagaagttgagacagggactatcccacttgcccatgatcacaaagctagaaaggaagggccaagatttgaacctaggcagtgcaagtgtagagtctttgctgtaaaccactattcctggggagacaggtaaaataaattgtatgtgcaaatgcaaattgataagtaattgatacaatactccacccctttattccagatatgagaaatgagtgttggacgtcgaagaataaagttgttgggtatcctgatgatggcaaatgtcttcatttattttattrtggaagtctccaaaagcagtagccaagaaaaaaatggaaaaggggaagtaataatacccaaagagaagttctggaagatatctacccctcccgaggcatactggaaccgagagcaagagaagctgaaccggcagtacaaccccatcctgagcatgctgaccaaccagacgggggaggcgggcaggctctccaatataagccatctgaactactgcgaacctgacctgagggtcacrtcggtggttacgggttttaacaacttgccggacagatttaaagactttctgctgtatttgagatgccgcaattattcactgcttatagatcagccggawaagtgtgcaaagaaacctttcttgttgctggcgattaagtccctcactccacattttgccagaaggcaagcaatccgggaatcctggggccaagaaagcaacgcagggaaccaaacggtggtgcgagtcttcctgctgggccagacacccccagaggacaaccaccccgacctttcagatatgctgaaatttgagagtgagaagcaccaagacattcttatgtggaactacagagacactttcttcaacttgtctctgaaggaagtgctgtttctcaggtgggtaagtacttcctgcccagacactgagtttgttttcaagggcgatgacgatgtttttgtgaacacccatcacatcctgaattacttgaatagtttatccaagaccaaagccaaagatctcttcataggtgatgtgatccacaatgctggacctcatcgggataagaagctgaagtactacatcccagaagttgtttactctggcctctacccaccctatgcagggggaggggggttcctctactccggccacctggccctgaggctgtaccatatcactgaccaggtccatctctaccccattgatgacgtttatactggaatgtgccttcagaaactcggcctcgttccagagaaacacaaaggcttcaggacatttgatatcgaggagaaaaacaaaaataacatctgctcctatgtagatctgatgttagtacatagtagaaaacctcaagagatgattgatatttggtctcagttgcagagtgctcatttaaaatgctaraatagatacaaactcaattttgcatagaaaggtgtattttgaatagttcccatgttgtgttctcacattagagtaatttctrtattaaaccatgaaaattgcctttatgagtgatacccrtttgagggcctctaaacccttcaatttggtactcacgtgaagagggaaagcggaagatggtaatttttttttayggatgatatggcaggatgattggttctgatcttaccggctagtggtcatttttaaaaaacttgtaccctcttatctgaaatcctgtttctggaatttggccattttaagtgattttgtttgccctcttctataatattcytacttcccataataatgactgatttatttgtaattcaggtatttataaacctattggctacaaagactttgttaaacattatccagtggttttcgtgaaatggaattatgtttatttttatgggatttgggtaaattttaaattgtctagaaaactgaaatttcagttgtcagttgtggaattcagtttttcaattgtggaaatttcctgccaccccaacagtatttttgtgtgttaattaattttgcaaaatgagaatcatggtgtgacactcatctaatttatcttgttgtgatgttatggtcataataaggagaaagagggtttaatttttcttgtatttggtttcctggtggtatcatagtgtaattttagtatttgaaaatcagtgtgattccttaatggccaactgaagattgaattgccgctaacaaccatatcgtgttagtgaattttcaatatggaccaggaaggcatatgtattttgaacttgagtgaaaaggttgaagttacagacttttgcatagatggtttgtcaatttaaaattccagaatttattattgccatattttcacatgctgcttatacaagattattattgagtagtaactgcttccctgtctatgtagaagtgcctgtgtttttatttattgttcagatcaaagaccaaaacattttcttaaatatattttatgtaatattttatttgtatacagtgttgttgatgaaatatttaactagagcatgatattttaaatgttaaggtgtaacatatgttaaataaaactgttatttttgaattttaaaatttgttttttgggggtatgaactactagagtttaaaattctgccaaactattacttatatgtactattgtgtaacatactttcttgaaatatttttgtttatagaattgaaggttcttatcagatgggatactggggactataaacaatggaaataaagccactgtatttttaattttttgtgtaatgtgtaatctataatccttttgtttcccatatttgagaacatttttccctgaaagaggccagtttcctccccagaaaccattacagtagtgttgaactatcactgtctctcagtgcgtcatccatctttgcatttaaaatccccaaagtgctttcccatttaaagtctttaaagaaaagtgagaatatttatttatgcttccattttcagtgagtataaataatttaattagggagtggtgtggcattgtaaagattgtgttatcctaagccatttctattttggagtttgtagccacaaagatgaaatatagaatcagccttgactactcaatttcctttcatagacccatgttgagaagacactactaacgtccagtgggaaacaagtagacaattgatgaagctcaaaaaacagaagggttagtgttgtaagagcaaacagtctaatcctgtttggaatgtggaagccatttctgagcaagtatgaggacacaggtgcttgatttgagattgaagactgttttcagcctggtcttcctgaaggtttcctggggcctgcatctgccttctactcccatggctgctagcacacacctcccagagggccatattgccacattatggctagagaagagtaaagaagaaaagaagctctgagaacattcacaggtaattggatcacatttgcatttgtccaaaaaacctgaccacgcattctcaggtaataggtttctcctctcagaggaatttcaattttttttcttgttagagattccccttytctgaggtttcaagtctcttgtagagaaagaagagatggagcaggttttgaatgaggtgtggagggccactggggggccttttgtgagccttcagtccacatgtgtgctgttgtttgaacatgagttcttggtgctgatgacatttggatgagatgatctctggcccttcttcatttggcagaagttcttgtgcaatggctgcccaagcccaccacactggtcattgctgccctgtgagatggacctcatgggctttttagcagagcacgttaggttttagagctttacgcatgcttgggctctgttatggcgcaaacccttaaatccaggaaggcctctcttggtgcccacaatatgggttctcacctgatcccccatctcacggatggaactgctgtaagtctaacttattctttgagaactgtttaacaattaggcctcaagggaaactggtattttgggcccttttcttggctattcccaagtcatgttgattttgagtttgaaggtcaaaaaggctgaaagcattgccagggtttggactattcaaaaacccaagcaggtcttaaaaaaaggatgcaagagacaagaatggctcattccccttcctgatcctggttatacccatgtcctttcttgagatggtcaagagaggctggaaagaagaacaggaaattgggggagtgctttgttacacttggaaattgagtcaagaattaaagacacccaaagtgggccatctcctacttgtccacacctgattggtggtgatgcggaatatttgatgtcccgggtcatcttgactttctcagatgcaaaaagggagggtgactttactaatggaaaggatgggaagctgaaatgaatgaagccttcagttgggccaaagtttaacttccccgtgatttgccttctgatgaaaaatgccagatgaagtgaaaattcttgtttcttgcctagaacaggaaaatacatactttacatgctgggctattgaggctatgaaattaggttttccttaatgtaaatccaattgctagaaacatttgccaaataagattttttgaactgaactttgtttgcattaatctgaaaaactgaagtattctgactcatgaagttctcaaagtaatacactaaaaaagttttgcccttaataccattatatcttgtagaggccaagaatgagggacttctgtctttaaagagccctaaaaatctygtttgctcacatgatatgaattaccgtatttgttgtaaatgcgcaactttgtatacactaaaagcactgccaatatgattttttatcagttgtgcctcagttagagatattaaaatgtgacatcttaaatattacatattagaataattgaaatacagcatgagtctttatatatttttttaaacccttaaattgaaagatggagtcctaggccgggtgcggtggcttacgcctgtaatcccagcactttgggaggccgaggcaggcggatcatgaggtcaggagttcgagaccagcctggccaacatggtgaaactgcatctctactaaaattacaaaaaattagccgggcgtggtggcggcacctgtaattccagctactcgggaggctgaggcaggagaatggtttgaacccaggaggcggaggttgcagtgagctgagatcacaccactgcactccagcctgggcgacagagcgagactccatctcaaaaaagaaaaaaaaaagagtcctgttcaggtgcatttcctgcttctgtcactttgacctgtgtttatgaattctcatcccaaccaaccctggtggcttttgagctttgtcagttgctttcttcttggctgttgtgcatggtgaaaggggatgtgttaactgcactgaagcagcgagagtagttttaatttgattgtaatccaagggcttatttctaagtcaggggcctggcagttgaacaaagtgtttgcagcttcctgacagctgacccacacgggattggagggtgggcctttgatgctcctcaagcaataagccacatggagaacttgcatcgtaagtgttagcaagggctcacctcactgccttggaaacctaccatcctgtgactcgccctttcccagcctgtcttcaactcacatcctctcttcctgctcatcaccccaggccttcctgaagttggctttcctagctattctactgggcaccaacttccaccacctctttaaaaagtatctcaagtacaaaataaacattatcctatccttggtttgggtttttccagaaaacagactttaagacagggattctagctcaggtaggctttggtggaagtgcaggcacaaagttcagcaggaagtggcccttggaaggcagcagatgaggagtgtgaagccactgccactgtgggattggagctcaaccccacagggaatctggaaaacagtgcagaatgcatgcctcagaacgcacctgtctgaggcttgaaggagctgaacttttttttttttttttgagatggagtctagctctgttgcccaggatgaagtgggcgcaattagtggcgtgatcttggctcactgcaacctccatctcccaggatgaagcaattccccgcctcagcctcccgaatagctgggattacaggcgcccatcactgtgcccagctagtttttgtattttcaatagagacagggttttgccatgttggccaggctggtcttgaactcctgacctcaggtgatccacccacctcggcctcagcaaagtgctgggattacaggcgtgagtcaccgcgcccggcctgaactactttttatttctattttttaagacggagtctctctctgttgcccaggctagagtgtaatggtgcaatcccagctcactgcaacctctgcctcctgggtttaagcaattctcctggctcagcctcccaagtagctgagattacaggcatgtgccacccgtccagctaatttttgtatttttagtagagatggagtttcaccatgttggtcaggctggtcttgaactcctgccctctagtcatctgcccgccttggcctcccaaagtgctaggattacaggcaagagccaccatgtctggccttagtagattgtagaattctgccggaaccatcactccactacaaagccaatttggttttaagtcatgatgattctacccgccctctagaaattttttattttggccctctttttttctttaaaaaatttctgaaacagtttgttctctgattgctcctctttccataggagcctgttcttcatggatgtaaggactgtgtataagaaaatgaattagagttttttttttttttttttacaattcttatctcagggattaggtgagttgttcaccctaattcttatggagaagaacaaatactaagtgatgcttggtcctttaatgcaggactgaactgatttgtagaagttcctaggaggtgtttctttttctgggctgtttacccacaaggccacttcctacactggaaggctgggtgagggtcactgtatggacgtatgtcctggcttcctttcagggactgagcaggttgggggcaggtagacttgaccccagatcttggagctgcctttcttccctttgctctgggtctgtttcgcggtattctactcagctgcttcaacctgaaccctctacctccccttcagtttagggagcattccttagcaggtaagcatctgagctcacgtgcacttaacctgtgtgtttgcgtgtgcgcatgtgcgtgtgcatttgagtcttgaagagttggtgaagccagccccccagttagtcaccccttctgcctcctccaagctgggagcctttccagagaagtcttcctgtaacccacatcccgtgcagccttctccccatcgtgtgctgggctgtggtttcctcttccagtttgtccattaatacagtgccggatgtttcccgtctttcacaaaatgaattatttctcttggtggtattgtcttcactgccagtgcggccttgggcttcttcattatatcttttgttatttagatagggaaggaggcaaacacttctgaccatccactattctgacctgggagcccccagcattttaagtgtattaatttaattttttgagatggtctcactctgttgcccaggctggtgtgcagtggtgtgatctaggcttactgcaatgtctgcctcctgggttcaagtgatcctcgtgcctcagcctcccaagtagctgggaccacaggtgtgtgccaccacacctggctaattttttttttttttttttttgtatttttagtagagatggggttttgctatgttggccaggctggtctcgaactcctggcctccagtgattcacttgccttggctttccaaagtgctgggattacagatgtgagccactgtgcccggcctatttataattttttttttttttttttttttttttttttttttgagacggagtgtcgctctgtcgcccaggtcggactgcggactgcagtggcgcaatctcggctcactgcaagctccgcttcccgggttcacgccattctcctgcctcagcctcccgagtggctgggactacaggcgcccgccaccgcgcccggctaattttttgtatttttagtagagacggggtttcaccttgttagccaggatggtctcgatctcctgacctcatgatccacccgcctcggcctcccaaagtgctgggattacaggcgtgagccaccgcgcccggcctataatttttaaagacagggtctctgtcccccaggctggagtgcagtgatgcaatcatagctcactgcagcctcaacctcctgagctcaagtgaccctcccgtctcagtctcctgagtagctgggactccaggtgtgcgcccccatgcttggctccccagcattttttcttgtctttcctgacctgaggccttcaccacattgacctccacacctggaaattctccttcctgccgtggttacggcatctgttgcccgggttcttgaatctctgcctgaaagctttctttggctgctaagtgctgggcctgatcctcccacactgcacccacagcctcttcctgggtctcttccttggcctccctgcgcagtcctcagagttatctctgtgggcgccctccccgaaatatttccacctctcgttcctttctgagtcaagcccactcttgagtccacctccgtgaaggggctgttggcccttcataccaggagaacccttctaggtttactcctagcccacccattcccagcgtcagcgccctcgcccttctctttcactggagtccaatcaaccctccatttcaaacagttctgtctctccagccctcagtctctccctgaatgtgcaagtcagcctgtccttgaagccagcacgactctcggggtcccctttgcccatctgtgtacacttctcagcttcaaacccagcaagtctcctgccccatccccttcctggggaaatgggtctctttcggaggccccaggcctgagggaggtccattttgtagaaatggaaggggttccattttatggtttctaaggtgtattttccacaaatttaaaaggattgtcagctggatttggtggcttatgcctgtgatcccggcacttcgggaggctgaggcaggaggattgctttaaggccaggagtttgaggccagtcttggtgacttagtgacaacgtgcctctattgcaaaaaaaaaaaagtaaaaggactgtcccttggctcctgatccttttaagtgctcttagctctggggcaggccctcagttcccttccaggttgctctgggttgcccaggaatgtgacggaggtgagaatgcccctcatatcaaggcaagaacgtgaatatctaaggtcggcacctccatcgtcattaggatcagagtgcattctactttgcttgtcctagtggatatctgccctgtgctcagagtcagctcccccacattcccccactcaaatgtaggagcttcccctcctctgactgcctttgggtgaggcccctgccccttgtctaccggaactgggtggaaaggacctgagacagagctgtctccctctgccttatcctcctcctctgccccttctgtagagctcagtagtgggaaagtggccttgggaaggggcctctggggctcgtccacagacacctgaccatgcccaggcggcatcccttcagctgtcagaattcctggggtgggtgggtaggaagcagccaggcccttccagcctcagtctggctctatccaagacctccctggacactagagaaagccccagctctcacctccttttgactcacgaccctctggggctcttcctcctctcattcaagggttcaaggcaactggggtttgccttttctacttttcctactctttctaccttttctacttttccaatctcactgcaaaatgtggcatagtaatgagctgttaactcatcactggataatttatttatagtctggcgtggagagaggggagtgaaaatgtagacttttgttgacacaacatgaagactgcagtgggaaaggcttgcaggaaaccgaactgggcggagattcggcaatcaggcaacaggtgccaaggcgctgcgcagggacctggccgggtcctgccttgtcgtttcagctattggaacctttgaggacagacctacctgcttccgagctgcagtcaaccaggaggccagagctgtggctaccttggcagcagctgtgaagctgctgtttttctggctggggaggtgggagaacccagggaaaacctcagaaaaataaagaaaatctgaatatggacaagctcagatgtcttaaatagcaacaatatcacattaatctttcctcttgtgggatatgagaaatgagtggtagacactgaagataaagttgttgggcttaaagttggtgggaaatgcctttatttatttaattgcaaaagtctctaaaagtgagtcgccacggaaggaatgaagaaggaggggttgtgatggactgtcaagaaagctggggaactttcccactcactgtcttgaagaacaagacaaagagaagatgcaaaaccaccccactgaggctggtgctggaggcctggggagagcatttcattgttgggggtggcctgtctcactggtccctcctccagaagttggagagatgctacctagctgagtgttgagcacttgtccctgcaactgagtacctgctcgacaaataggggctgccatggcaataaaaaacccagctgtggcagatgtttattattgcagacaattagaaatattctctgcattatcccaggtcttggcatagttcattgttg

SEQ ID NO: 93481 - DNA, 16597 bp, Homo sapiens
gagaggctgaggcaggagaatggcgtgaacccgggaggtggagcttgcagtgagccgatatcgcgccactgcactccagccagggctaaggagcgagactccgtctcaaaaaataaataaataaataaataaataaataaataaataaataataataataataataataatagtttcaggccggccgcagtggctcacgcctgtaatcccaacactttgcgaggccaaagtgggcagatcacctgaggtcaggagttccagaccagcatggccaacatagtgaaatcccgtctctactaaaaatacaaaaattagccggtcgtggtggcaggcgcctgtagtgccagctactcgggaggctgaggcaggagaatcacttgaactcaggaagcagaggttgcagtgagcctaaatgctccaattaaaagatacagaataaacatattctgttacataacagaacaaaacaaaaaaagaaaactacaggccaatatcactgatgaacataaatgcgaaaatcctcaacaaaatactagctatctgaatccaacggtatatcaaaaagatagtacaccatgatcaagtggtttcataccagggatgcagggatggtttaacatacacaagtcaacaaatgtggtacattgcataaacagaattaaaaacaaaaatcaaatgatcatctaaatagacacagaaaaagcatctgtcaaaatccagcatcccttcatgattaaaaccctcagcgaaactggcatagatgagaaatacctcaaggtaataaaagtcatctattatactgaaagggaaaagttgaaagcattttccctgagaactggaacaagacaaggatgcccactttcaccacttctatttaacatagtactggaagtcctagtcagagcaatcagacaagagaaagaaataaagggcatccaaatcagtaaagaggaagctaaactgtggctgtttaccgataagattgtatacctagaagatcacaaagactcattcaaaaagctcctagatctgataaatgaattcagtaaagttttaggatacaaaattaatgtacacaaatgaataacactgctatacaccaccaacaacaaagctgagattcaaatcaggaactcaaccctttttacactagctgaaaaaaataaaaaaaaataatttagcaatatacctaatcaaggaggtgaaagatctctacaaggaaaactgtgaaacactgctgaaagaaatcacagacaaacaaacaaatggaaacacatcccatgctcatggatgggcataatcaatattgtaaaaatgaccacacttcaaaagcaatctacagattcaatgaaattcccaccaaaatatcatcatcattcttcacagagctagaaaaaacaatcctaaaattcatgtggaaccaaaaaagagcccacataacaaaagcaaaaaggataaatttggatccattaaattacctgactttaaaccgtattacagggaatagtttggtaacagccaactgatctttgacaaagcatacaaaaacacagagtggggaaaggacaccctattcaacaaatggtcctgggataattggtgagccacacgtagaagaatgaaaccgaatccttatctctcaccttatacaaacatcaactcaagatggagcaaagacttaaatctaagacctgaagccatacaaattctggaagataacatcagaaaaactgttctagacattggcttaggcaaagagttcatgaccaagaacacaaaagcaaatgccacaaaaacaaaaataaacggaacctaattaaactaaaaagcatctgcacagcaaaagaaataatcagcagagtaaacagacattccatagagaaaatatctgcaaactatgcatccgacaaagaaccaatatccagaatctacaaggaactcaaacaaatctgcaagaatgaaacaactaatcccgtcaaatagtgggctaaggacatggatagacgattctcaaaagaagatatacaaatggctaagaaacatatgaaaaaattcttaacattaccaattatcagggaaatgcaaattaaaaccacaatgagatacaaccttactcttacaagaatggtcataatttcaaaatccgaaaataatagatgttggcatagatgtggtgaaaagggaatgcttttacactgctgataggaatgtaaactagtataactaccatggaaaacagtacggagactccttaaagaaccaaaagtagaactaccatttgattgagcaatcccactactgggcatctacccagagttaaagaagtcatatgaaaaagacacttgcacacacatgttaatggcagcgtaatttgcaattgcaaatatatggaaccatcctaaatgcccatcaatcaataggtgggtaaagcaaatgtgatacatatacacatgcacacaccatggagtactactcagccataaaaaggaatgagataatggcactcacagcaacctgcatggagttggagatgattgttctatgtaaagtaactcaggaatggaaaaaacaaatatcctatgttgtcacttataagtgggagctaaactatgaggacacaaaggcataagaatgctgtcatggattttggggagtcggggaagagtggaagggggcgtaagggataaaaggactacccatcgggtacagtgtacactgctcaggtgacgggaacaccaaaatctcagaaatcaccactaaagaatttatccatgtaatcaaaaccacctgttccccaaaaactattgatgtaaaataaaataaaataaaaagaatgagggtggaatgaagatgttatcagaaaaaaaggaaaaaatggagtttttcactagtagcacctagaaaatttgtaaggatatactttaagcagaagaaaagtcatgccaaataaaagccttaagataataaaagaggaccaaagacagtaaaacataggtacatatatctaaagggacactgattgtataaaatattaataataataatgtgaatgtggaagtaaaagaaagaaaagaagaaaggaagaaagaaaagagacaaaatgataatagctggctgctactatttatatcaggagggaataaatgaagttaaatgacatgaagatctttgcattttctgagaggaggggaaaggtattcattaacttataactttgattaggagatacaataaaatctaaccatatcctatttataagcaacacatttaatacataaacatgcaataagattgaaactaaaaaataagaaaataaaccaaatgctatctaaaaagatagctaatataataaaataatcaccagacaaaatagaatttaaggcaaaaggcattactagaaaaaaaataactgttaccttaaaataatatcatagttcctcaaaaagttatgacaaattaaatttcggtaactactgagcctcaaaatataaagagaaataacaaagggctatgtaaggagaaatcgatatataccaacagtcactgtggaaacctatttctttcagtatttgataaagcagacaaaaaattcagtaaagctatagaagatgtaaataatactacaaacaaaccagatcccagatctaatgcatgaatatgtatatcgcacctatccactcaagagtacatttcttcttcagcacacacaaaatatttatgaaaagtgaccatggaggaccataagaacagttgcagcagatttcaaaggactaaaatcacaaagaacatgtcctttggtgtgtgattaagcaagaaacccaaaacaacgaaatatctagaaatgccccgtgtatttgtaaattaagaaataaactttaaaataacccctgaaatgaagaaattgctatccaaattggaaactggccttatctgaacaataacaaaaatactacacataaaacttcaggtaaaatagtacttagaggaaaaatatatagctttactagtgataaacagtaagctaagcacacatttcaaattagaaaagggacagcaaaataaactcaaagttgagatgaaagtaaatagtaaataatcttgaagtcaataaagttaaaaacaagcagccactgaagtatgatacatcaaccattaggtatacatcaaaacattaggttttttagaaagggctgatgaaattaatagactgctggtgaaattgatcaaaaagaaagagaataattacacaaatctaataccagaaatgacaaagggaattgtactaaagatgttgcagacactaaaaatataataggaggatcttatggaaagcatctagccaataaatttagataaaatgaaatagattctcaaacgtatcaacagaacaacagcatcagtcttgtctagtgtcttgttagaaacacaaactctgggcctccaccccaggcctactgatgagaaactctgaagatggagcttgggaatctgtattctaacaaatcctcccagtgatcctgatgctctgaagtttgagaattgcagaaccattccaaaacaaacggtactcaattttcccataggcgagtacacaagtagtctcaatgtttattgttagaattaaataaatggccaattttgaggagggaaaaactgtctttttaaaggggtttaaatagcgtaaatgaagcttgcattttgtcaaaataaacatatctttttttaatttcatgagactaacattgcatgtgagaaacaaaatattcattatcaaaaactgctttgaaatactttaaaatatttcacagaaatattgaaaagatattttcttatttgcaatttactacttatggaacctctctatatgttcgtttgtcttttacaatgacatattcagctcgtgtaaccttgctgtcattccaagattattattttatgctaagatttttaagttcaccagaaagttttttttaattccaaagtacatttcaaaaataccctcatgagtctaacataacactcagaattaaagccacatttctgaatcacaaaaatttctcctattctatttgtttcactcagctttatttagttgctatatacacatttattgtwtaaaacgacagatttccaaccaaaagctcagtaaacactcagagtagtcaactttaatcataaacaatcacaaaacaaaccttaaagcatttatatcaatgtgaagctttgtaggaaattgtttwcccaaagtattgtggatgattattatgaataaaataaatgaggtaaagtaatgttacaataatgatctggaactgtgagtcaaatgagttaagattaaaggcacaaagaaactctgcctaataaaccagcagataactgctggaaagaaaaatatgttcctcgtttgaaattaactgccaaacattcccaacctacacaaagctgtcataaaggacatctaaatctgtccttgtttgtaacatgtgttgtgacaagatttgacagtttatcaaaaaactataattgccacctaaacatctagcattttgtcaactgcaagtatgtttagtgaaagcatttatttcatttaaaatacaacatccatttttcttcactttctgaaagaactgactgaatttcttttttctctagctgataagctgcatcagagctctctttgaattatttatgttggaattgtgaagggtaaaagaataatcggtaaagcaagaaactattaccaaggttttatatatatgtgtgtgtgtgtgtatatatatatatatatatatatattctgggtattgactcaaaagaccttcaaaatacagtaattctcacagatccatagagatgacatttaaatatgcttgccttgggaaggagaaagataaggcattgtctctatatcgcaatttttgtttccagaataatttaagaaacaatgtccttaatagaagatactattcaataggcatcattcctacctgtaacttgtgaaatgcagccaatgataaaacagatgtccctctcaacctacagagaccaaagtaaacagacgctaaatccccttgcaatagaccaggtaggtaacagaaatgtcagaataacaaagctacttccctgacactactaatggttcatttctttctgggaaaagtttttgttttgaaagcaaaaaactttccagtctcatgtttgggattwtgttctttattgtagttgcttggtaaaagagaaaaaaaawgcaaatattttgtagtacttttaaatttttcctttattctgataaatctcaaagaaaaggcttgaaagtgtatagttgataaggccctacttggaaattcaggagtcccacattctaatccacactctgcctctatttagctgatagatcccaggcaggttgcttcatttctctgagccttagttccctgtcagtgaagtgtgataatcagactaggtggtctctaaggccatatctatctttaacattttatgactgtagacaaatttctggaactataacatgtagcaacagctagagcttgaaacaaaaatagcagcaagacaaaaatttctcctccttaacacctcaaggaaaatgcaaccaagtatgggttttaaatgttcacattagcatttaatcctatttaggtaatattaaacctgtttagaatctgttttgttttttaaaaaacactgaaaaatgtgtgacacacagaatagtaagagaaaaataaattgaaactacaaatactattagtgcttctaaattaagccacgggatttttagaaatcactttatgtagtctggctaagggtgagaattatgtggtataggtaggtctgttgattttttgtgtgtgtgataaaaagaatatgaatgaagggttatggacagaaatgggctggcatacactgtcaaccaggaagaggctgaactagagagaaaaccatgttgatgccaggagagaaatgattggatcagcagcaagccattttggtgtaaaatttaaaacatagctgtttatttgagtttataataatacctcattcaatatataaaactacctttttatagctaagtaatgtttttcacagacattgctgaaycttacccatctttgttgcctaccccatttcttatcccatttctgagtttatcctattcatgaacccaacacattaaggaagcccagaagtgtggtgagaaaatctcttaawttatttggttatyttacaatatgaaaaaaatgatgatttggttttaggctaaataaaaacaccctggtatccaaatgtcaggcacacaattagcaagatataaatggttgatctgtatctgatgcctccattatttttatgaaatcattggcatctatggtcctttctgcctccttcctcactatttccagccccgatacgccatagaagctgtatacttaaaatttgctaacaaacatttaattaccaaatacattttgttcatcwtttttactacaaaagtaataaatgttcaaatgccacactgatagcagtaaaatgtaacagtcctccttcattctcaactctcacaacctactcccctctccaaaggtaattattataaagaggacttccatgctaattggatgctttcagtatcacataatcttaaatacataaatataatactatgatatttttgtgactgactttacctttaaaaaaatacctaggagacatttccacatgattacacttaatctatttaatggtcgcatatgtatatacaataaattatttggtaatttacctattgatgaacatttgttggttcccatattttgcttttataaacaattctagggcaattactayttgtcatgcacaatttttataccctagaagtartataatacctgacatataggaggtgttcacaaaatatttattgcatgaatgaatacagctacactactatgtagccatatatatttggggtgcttgtgaaaatttctctgaaatagattcctagaagtatacatgatgagtcaaagtttatgtgcaaaattacccatgcaaaatctacatatttatacattccatccgaatagaagaccttatctatcttaacattttggctacttgatgtgtgaaaatagcgttttcttgattacttccattgtttcacgtttcttatccatttttttttttactgtgattgcctatttatgccatttttcaactttctattttattgtctttttctcacttcattggggaaattctttctaaaataatcttttgcatatactttagtaggtaattttccttttaaacttgggttttgctttgtagttttatgtttttatgcattcaaatttgtttaaatagccctgtgaaactaatataggtgctaatagaaaaaaactccatacactgtaaatacttgattatttagtctaaaagtgtgaagtgggaggtggcaagcagaaattttttcaagagacccagggtcaatttgggaccgcgcgccgcaagggggaagggaccctaacggttgagtaacaaccggaagccattagtctgtgcttcacttccgttccagcctcagcggcagctggatcgctcgacggagtgcctctggtagttggccaagacgccgaatatcaaaatcttcagcggcagctcccaccaggacttatcccagaaaattgctgaccgcctgggcctggagctaggcaaggtggtgactaagaarttcagcaaccaggagacctgcgtggaaatygatgagagtgtgcgtggagaggatgtctacatcgttcagagtggttgtggcgaaatcaacgacagtctaatggagcttttgatcatgattaatgcctgcaagattgcttcagctagccgagttactgcagtcatcccatgcttcccttatgcccgacaggataagaaggataagagccggtccccaatctcygccaagcttgttgcaaatatgctctctatagcaggtgcggatcatatcatcaccatggacctacatgcttctcaaattcagggcttttttgatatcccagtagacaacttgtatgcagagccaactgtcctgaagtggataagggagaatatccctgagtggaagaactgcattattgtctcgccagatgctggtggagctaaaagagtgacctccattgcagaccagttgaatgtggactttgctttgattcataaagaacggaagaaggccaatgaagtggactgcatagtgctagtgggagatgtgaatgatcgtgtggctatccttgtagatgacatggcagacacttgtgttacaatctgcctcgcagctgacaaacttctctcagctggagcaaccagagtttatgctatcttgactcatggaatcttttctggcccagccatttctcgcatcaacactgcatgctttgaagcagtggtagtcaccaataccatacctcaagatgakaagatgaagcattgctccaaaatacgagtaattgacatctccatgatccttgcagaagccataaggagaactcataatggggaatctgtttcctacctgttcagccatgttcctttataacagaataacttctaggttatgctattttaaaataaaataagattaataaaaacaaaccttgcctttattttttcttaggtttgattaaaagttcagcagaagatccagcttgctccagtgtaactttctacatcccacatcaggtatataagagtttaccttaaattagggaaaaacaggttaagaataatcactaggatttcctgactgggttgtctcatctggcttctttgatgattttgttagcccagcagctttaactacagcccttctgctgcaaagatttcagacttctgagggtgttttgtagaggtgtttgaaagtggttggaaagcttacatgtaaatgcttcggagttttcttttttcagaacaactagcaataaagccacccaatctaccccctgccccaaacccccactttgtgtcacaaattctccaagttcgatgctcagttgcagcaagagccctgagccaccacaaaattaattctggttgctgaacaccctcaacagcaggaataggcaactttcagcttgagcagccattgggatcttgagaggaagcaacaagtacagtaaatgcttcttgagaggaggaagattgatctgtcaccatctatttggagactatctatcttggattctcagttatacctgttccttttgatttagctttacctccacccatcttgaccttttcattgctaaatatcctactgggccccaaatggtcagggtaccatagtcttctggaaggcaaacccactttttgctatgtaatctctaatatttatattagttatttttgctgtaacttaatcttccttagtttattaccaccattgtagtagatgttaggtgacattgtagtgacttttgttaaatttaaacatttaatttttatctcccttccttgtattttgttggcccctcaaatgacctcagatttatatttttaaaatgttgttattgtcctttttagggaaaaccaataaaatatctgcatatatgtgtggggtggagaggggtggtgcagagcaccatacctagatttatcatgtgaaatttctgatctccaagaaaaaatcactaagaatttctaaagagtaaaacaaaaacaagaaagttttaaagaaacaatattcagattgctttaaatttttcatttgaacgcttgggctgtaagcaaaatggaataatttcctcacagttctaaaggaatattatttttcacctaaatttctgtgcttagccaaactatcattgacatatgaagacaatattaagggactcagaaactactaccactagtgtttcctgaaagtacttcttggagatactgaaaacaaaaaatatatacagccaagaagaacacatagaataaaagagatggtggtaagcaaaaaaagaagtgacactgacagaaaaataatttttatgaagttactgtaaagattatggccgttattaaggtaaaactcacataaaattgggccacatcatgaagcaattttgaggctgggaggagttagggttagtgtaaatttattaaggatcttgtctagttttggatggaggttattaacaacaatcattcacattatagaaaaacctgagtttaaataaggtattttctaaaattcaagggcaaggagcaagccagagaagaaaagaatgggataaataacttccaaactcctagaaagaaaaagaaggtggagcaggggggtgggggggaataagcaaaactcaacaaattgagctgaagataggaaataaagaaagaaaacatagcaaagataaagtacccaatatatactatcacaaaagtcaataggttaattttgtaaaagatacattattagattgggtagctaaaatacctaataatatgctatttataggacacacatctaaaaagtttggtataaagagatagagaaaatatacaaagtaaatggtaacaaaaagaaacaagcaatgatagatttagtcaaaacaaaagtggaatgtgctttgctgattaaacccaccaataagttataatcatcatgaatctttatctacctaacaactcaacatggaaatagaaaaagaaaagtgaatcagcgagaatataagaagaaatggaaacgcacaatcatcataatcaaagaaggaaattttgataaaactctcataagttatcaagaaaaggtattatagggtttaaatgactccattatcacaacttaatatagaaattaaacataatttacatttcaagtatgcatgaagcaaatataacaggtttcacaggttttaaagattttttaaaaagaaaaaatacataataggtcataaaaagtcttaataaatttcttaaagaaatgtatgtagactatatatagtatagtagcattactactatcatcttaacaatattatgaaaaaataaaactatcagtaaaataggaatagaacaaaccttgcttgacctgctagagaaaatctggtatagacctaattaaggacatacttaatgatgaaacattgaaaacattcccattaaatttctaaaccaatgggaaagaggcaaggaaaaaaagagaggtatcaataccagaaggaaagagccaaaactttcattatttgaagatgtcatgattgccaacaaaaaatccaacaatcaaaagaaaaactcagaattcataagacaggtcagtaaagtgaaagtatgtaagataaaatgacatctttcctaaataccagtaaaatataattttaaaacataattgaaagaaatgtttccacagcctaaaacaataaaatctacaacatgaccagtaataaatcccaaaactgtaggatttgtatgaaaaaatgttgccaaaggatatagaaaatacctgaataagtacattataaacttggataggaagaacaatattgcaaacatgatagtttcctatcaagtcagtgtgaacctaatcaaaatcttaaagggattttttttttttttttttttgtcagagtctccctctgtcacccaagctggagggtagtggcccaatcttggctcactgcacctccgcctcctgggttcaagtgattcccctgcgtcagcctccccactagctgggattataggtgtctgctacgacgccctgctaatttttgtattttttttttcagtagaaacgggatttcaccatgttggccttgctggtcttcaactcttgacctcaagcggtctgtccttctcggcctcccaaagtgctgagattataggtgtgaggcactgtacctggccaaagggatttttaagataagagaatttgacacaagcttattttaaagttcatctggaaaagtaaataagcaaaaatattcaacatcttttctgtgtcacaatacattaaaacatttcaaagctacagtgattaaaatgtggtattgatgcaggaatggacacataaattaatattgcagaatgtatattcctgaaacagactcatgtatacttacaggaatttagtacacacataccctatttagtggagggactgtgttactggaaagaggtacataactgaatcaactctatcagagaattgctatcacaaagtccctatggagatgctttcctgatatcctgccttggcaaccacktctgcggtctactcagagtctccgaagtggggatgagactcctaccttagttttttcctagctatcttcatacaattgttggtcaatctagatcacagtgatgcttaggatggcctttttaatgtcagttagcacttatcaatatctagtttctccatggtcttaaccttctgcttccttgattgtatcctggaaagtgcctcttcaaaagcctctccaaggcttctatttttaagacccattgtaacactattttcttgcttatatgaagcatattcaacattattatttccacatgcttaatcagtcatttgggacaaacttctctacaaaatacaaaataaacaaaagacggcccattgaatagtaaataacacatgctgcagaacatattcaccctatggtagctaagcagtgggcctcctagctgaggctatagtgttcttatgcttattgcctgagaactgttttatacagttcgtcacactacacacgaattcccattggctgagagctcacacccatatttagagaaagagagagagagggagggaggattctgttaaaatgtcattaaatcaactcaggaatcgtggtacatgcctgtagtcccagctactccagaggctgaaatgctgagatgagagaatcacttgaacccagaagttaagagaccagcctgggcaacatagcaagacctcatctctttaaaaaaaaaaaaaaaaggcattacctcaaatattcatatatatgataaaactggcatattatagataaataaggcattgatcaatcaataggatcaatagggccagataactagctactgattgggaaaccacagctttatctcatccttaaatgatgtacgagaataaattccctaggaatggttataaaaaacagaattgtaaagcatgagaagaaaatgtggaatcacatatacctttatagttaaaaaggccttttttttttttttttttgaaacagggtatccctctgtcacctaggctggagtgcagtggctagcgatctcggctcactgcatcctccatctccttcgggatcaagcaatccttctgagtagctgggattacaggcgcatgccaccacacctggttaatttttgtatttttagtagagatggggtttcaccatgttggccagggaggtcttgcactgctggactcaagaaatcctcccgactcagcctcccaaagttctgggattacaggtgtgagccaccgcacctgtccaaaaaggcctttttaagaaggatataaaacttagaactcataaaagataagattgaaacaggacttctgtgattctacagccagaaacagactgatactcagctacaaatgtgtactaccctttgagagaggatgaatgactctaagggcagagtggcacagaggccagctggggctgctgaggacagcccagaagcagactgagctgccgccataggcccagaggctaatggagccattgctgcagactcagaggctagagctgtggccccagcaagtggagcatcatcttagtccactcagactgctgtgataaactaccatagactgcatagcttataagcaacagaaatttacgtctgacagttctaaaggatgaaaagtgcaagatcaaggtgctagaagattctgtgcctggtgagggcccacttactggttcatggacagctgtcttttcactgtcttcatatgacagaggggttagagaactcttgggggtctcttttataagggcactaatcccattcatgggggctccacccttatgacctaatcgcccaccaaagtttccacctcctaataccatcatagtaggggttaggatttcaacataggaattttggggagacacaaacattttgtctatagcaagcatcaagccacatataattagtcttaggtcttgaaacttaattaaatttctcctactagatttcagagttgggactgacaacctttttattccttccaatttctctctttttgaataggaatgtataaggatatatattgtaaacccaattcatgcataaggatacgcaatgcctgtcccactcttttactttggaattagataacttgttttctgtgttcgtgatccagagatagagaggaatttctgccccaggataatttatacccatagtctcacccatatctgatttagatgacaagatctgaggctttggagctgataatatttaggtgagattttggacttagtgctgatgttatcatgggctgagacttttggagatgttgagatgaggtgaacatgttttatatgtggacagacatgaaatttggggagcaaaagggatagtaggctgaatagtggcccccaaaaggatatatccaaatcacaacccccagaacctgtgaatgtgaccttatttggataaaagatctttacagatgtaaataagtttaggattttgaggtgaggtaatgctggatttagggtgggccttaaatatcattataggaatgaataggcaaaagaaggttggagagacagagacacaagggagaaagtcattgatgatggaggcagagattagagtgacacgtctacaagccaagaaatgccaaggactgccagcagctgctagaagctaggaaatagactctcccttagcgtctccataagcaaccaaccctgctgacaccttgactttggacttttagcctccagagaataaatttctgttgtttcaagctacccagtttatagtaatttgttactgctcccccgccccccaggaaactaatacagattctggtagcaggaagtggagtcctgctataacaaatatgtaggaatgtggaagtggccttggaattgggtaatggtagaggctgaatgaatgctgaggtatatgaaagaaaaagcctaaattgctttgaagagactgttggtagaaatagagttgttaaaagagattctggtgagggctcagaaggaagagatgcttctctcatcttagagaatgtatgtgtcctcgcagattgttggtaggaatatcaacattaaatatgcctccagtgaggtctcaaaagaaaatgaagggtatgttatttgaaattgaaggaaaggctgtccttgttataaagtggcagaaaacatgaatgaattgtgttttactgttgggtggaaggcagaacttctaagtgattaacttggatatttagctgagatttccaagctaagtgtggaacatgcagcctggttcctccttgctgcttatagtaaaagcagagaggaaagtgataaatgtggaaggaataaagtaaacaggaaccagaact

SEQ ID NO: 93482 - DNA, 225437 bp, Homo sapiens
tttgagaaaagtgcccatgggtgtttcattataatcatgtcacctccaccatcaccctagccacaactaattagaacaaaggttggtgctgagcaaaaggctactagcaatgggaggcctattatgctgcctatgaaagcatcttaactgagcggactactcttcacctgataatgactaaataaaccaaacagattgtggttctaagaaagtttgaatgcaacatacaaaaagaatctcagtaagtagaagacagaatggggaaagttgcagagcgaagtggcagtaggcagaaggcttgagtagcagaggccataattaaggagggatcatgaggtagagggaagaagagaagaagaagcagctggtagaagcaggggaaatggttggagatgccacagtagaacctggttacaagatcacaggagctggcattgagttatgacaacttttagttctccaagaggcctgatagcctaatccttctgggatgcagataatatagcagaacagtgggttggagcattgaccttgagaacaagcggacrtggattacaatcccagctgcccaaataattcaggcatgttacttaatttctttatgagtcagttttcctggaaaaatgggaacaatacaagtactccctcatgttaattgctgtgaggattcaatgccatattgcttgaaaagttcttgcagtaatgcttatacatggggaaagattaataagttttagctattattattactataaattgtgtatccttataataagttcccatctgataaagtaaatgaagtatggatctatttcctgcaacctgaaagggactaacacatagtgtggctcagataattgaatgaaaagttgcaggaacaaaaaacttgggataggaaatggaaactatagtactctgttttcatagatctccaaacactccctggcttcattccctcctacccagtgatgctgtgcagcaatgagtgatcaaaatgtcaagtgccttccatgatatagtctggacaggaatattggataacgggggaaggagagttcctccagaggagtactggtcagatagaaaacatgtctttactgtagcaattcatctgagatcccgcagctaaataagatttgaatgaaaatattctctctccaacttccatgctccttcctcagcctttctaatatcagttaatgagctcttttaagttatagaactgatcattttgataacagtggttatgccaccctatttggttcactgtagacattcattacaggttgaattactttactcttcctttttgtcaagaatttccaaccttgaacacttcctgctgtttgatgctatgcaattgtcctctgggatgagtatcagtatacaatgatgcagcattagatctttgcttttagtctctcaattcttgcagaaatatgcttgagtttgtacttcctcttgaaagtctactacacatcaaatactgccaccttttccagctccatgcagtcaagtaggaccaaatttcttatactggtcaatgggttatgagtagaatgatgtacaccacttctaggagtgagtgagagttctcatgtatacatttcccccaccatgatagctttcaaaatgatagaactttcctgagtctgaatttgtggagtagagatcttctgttgccctatacctcatctccctgccaacaaagcattgaaccactagcctgagaaattaaacttcattgtatcaagcctctgagatctttgggtttatttattattgaagcacagcctatcatgtcctggaagtgaagtgctgaattaaaaaataaattgtgtagtgttgacctggtggttggcaacacatggttaggaagctgatatcaaaggtgggaaacagcaatttgtgttgtgcagtcataaaacatttggcaaaatggtcacctgcaataacttagaagtaagttattccaatatattccaatatatggaatcggcctaagtgtaagtgtttttaaaagtagtatatatacacaatggaatactatttacctgtaacaaagaatgaaatcctgacatttgtggcaacatagataaacctgaaggacattatgttaagtgacataagtcagatagagaaagaaaaatatctcatggtctcagtcatctgtggaatctaaagtgttgttgtcatagaagtagaaagtagaatagtggttaccacaggatggagagggcaggacagagggagggtaatgagatactggccacagatacaaaattactgttagagaggatgaataagttctggtgttccactgctatagcagaatgactagggttaacagtaatgtactgtatatttcaaaatagctagaaaagaggttattgaatgttctcatcacaaaggaaaaagtaaatgtttaaggtgataaatgtactaattaccctaattttgtcattacacaatgaatatacgtatcaaaacatcatattgtaccccataaatgtatacaactattatgtgtcaatcatacaaaaagattgtgtacttaattcacatttttagtgagaagtgggtaaagaccaaagtgtcggtagtgtgtcttggttattacttgctgcttttgcaagataataaacaaagaaaagcctggttattaaagtgcaaataaagaagaacaaatatttccataattccaaggtcttgccatgttggaaaagccaatacattttgctcccaaaagaaagaggtaaaattaagtaagcatttgaggcaaagtctgttaaaactaaatatttatgccaagaataagattaagggtgtgaccttcatgtctacttaaaatctctcagtggtttagaatgtctcaaagaagagatcaggtaaatgatctggccttactacttactactccagagagactcacatacattatgaaagatatagaagtgaaaaagcaaataaatatagcagatctaagctctgtgcctctaaagacctatggtgtggctactggaatagggaattgattaagtcagatggaagttgcgcctctaaggtcttcagacagttatacttccaaggaaactatgagattggactaaaaaaaaagtctgtggagccttacagaattaaaataagccttggacttccaatcatctatgggaagaaagtaggcccaaaactagcacatcccccaggaatgtgtttcaaaatattgtaaagaatgccttatcctgtttgtaaatacttatttgcaactgccttacttgggaaattggctagatgtgaacttaatttgattttacactttttaatgtcattgcaaaggaaactgggctactttgataagcatataggtcctttgcacagaacagattagaatataatcattcaggaagttcctttccttcacttaccctgattgacattgtgctgatgttttgcacactctgcttgacctccatttcagctccgcacatggaagctgcctacatatttgtttaccaggattcctcaatgaacccctttgtgcataaacagtcaatgacaagggtgaaggcccggcctgcttataagcatcttttatgctgcctgacctcgctcctggcacgcccaactcagtactcacttctgtactcctttaaagggcactgttaatgttgggtttgctgtgatgtaggtttgagtacagggggagtgccttgtgtgtgttgaccagtgacaggtaaagactctatccacgtgagggtgcactgaagttgagagtccaggaataatgggcttaatacccagagaaatacctatatttatgaaggagatgtcaggatgattttacaagggtgaaacagcacattgttgaacatgtgactagcatggatgtttaagagccaagaaaatgtgtgaggaataaggtcaaattgtagaaggaagaatattctagttaactggatcatattttgttttccctgtagtttttttttttttttttagcacataagacgctgtcattaatatttctatgatctaatgtgcaggccattttttttttaagtttgagtttgaattagtcaggataggctaggtaatgctagaagaacaaattaactctgcagccccagtgacttcccataactgtggcttcttctttgttcacagtgggaatggaaatttgaaatgaagagggggctaagtgagactgtgttctacttagtcacctggggactaagtaaggaattgtcatagcccatggccagagtaagctcatggccctgcccatatgtaatagggctggaaagtgtgggcaagcctcaggatattagatgatcagccaatatttctgcaataatctgctccagtggttatcaaaaatatcttagcccctatggagccatagagcatagaacttaccacccatatatcacacccaacccatctccaaaaattccttcgcttgctgcaaccatttctcaattttgaatctctaagttttagatggttgtcttattgctacatcatttccagatgtggattctctcgttctgggaatgtataagctatgttgttccaggcatacttgtaagtgcttgggaagcagtagtgaacaaacacacaaattatctgccacatggtacttacattccatcagagagaatgactaaacaaataagtaaatatataatactatgttagagttggaagaattctgatgactttaaagtctttgaaatacatgatagaaagattactttaaaatatttaataagttttctaaccttttagtaaatgtgaaaactttaagcaaatacaagtaagaaaatcaagttatcttggcaaaaagaaaatttacccatagtgatctaactaatgggaatgctgtatttgatatcttgctttccttcacttaacactttgcaagtatttcttttttggccttaaacagttttcaaaaatatgttttaatagctataaacattacaggctatataaaaattaatgcttttttattttttgacaatttctatgatcgtaaatgaaatttatacacataaatctttgcatatctgaatatatccctagcataaggtacgagaagtgaaattactggatctaaatgccatgtatatttatgacactggatatacattgtgaaatagatttttaaaaatgttatgctttctcactattattccaacaatataagacatgcatatttaaaacttcagcccaaactgccatattaaactgcatattttcatttactggcgaggttgatattaaaaaaatgtgtttattatgcatccccatttcttctataaattctttgtcatttaacattcctcctttttttctaaaaggctgttagtgtttctcttatatgtgatactttgtgtatgaaacatctacttgctgcaattttttaaagtggtaatttgtatttactttttttatattctgacattcaggagtgtttttatgcactcaaacttaccgatctttttcttttttatgtcttctattcctcttgtgcttagaaaacctttcctatcctgagatcggtaaaatatttctgttcttctagttatatttttaaattttatgtttttgataaaaacatctatgtgtaatttattttggtgaaaagactttgatttgagtcttttcaaatagttcattttcttaataccatttgttagtaaaataattcccataggtttgtgatactttcttacctgtcaaatttacacacacacacacagacacacacatctgcttttgcgctttcattaatccgtttgaaatattctatttttaatgttgtgtggggagtgatgacgctggtactttttgtcccagatgttaacaaaattacaaataattattggtacgtctcaacggaaccagggagggttgtggtacggaggcatttaggacccaggggaaagctaggctccgtatagaaggacagagaatcgggcgcacacgcctcctaccaaaatcacagccccttgtggagcccgagctctcattcacagctttctagagaaatctgagcccgaacctgccagaataggggatctcacccacccagttcagcagcgaggacacctgcagaaatacattcccaaagcaaggctgggcggccgtgtgaaggtatttgttaccttttttctcccctctgtatttgccgagcctccccgcctttcccccgctctttcgatgccatggctgcggcgtttcagcacttcggtatgtggacagctcccatctgcaatccstctgcactccatccctcccgcaccgcaccccgctccccgccgcctccgcggtccatcctcctcccggcgcccgctcagcctgcgcccccttacacatcagcacccccatctccaccatcaccgtcatcatagccaccatcaccagcgcggtaactatagtcacacaactgtgtcttgccacttagacaaagcccgaggtccgcagggcagagggaaagagctcaagttgacaggcataggaaggaaagttcaggtgaacaaacccctgaaaacaaagagagacgcctgtttgcgagaaagggaaagtgaaggcaggagggagagaccccaggcacggggacagatggggcacttgccagacaccagcagttagccagctgcctttcagcagattagggtctgtttagttgaggaaattaacatggcctagggcataatgtgattccagaaaaacagaaatgtaagctcaacctgtgtttctggttttccaatggagaatcaccaggaagcagggtgggggtgaccgatgactcatattcacccacacgtccgtttcctttcctaagtgtttaatgcagaaactccagaattaagttttttcttcttttttcactaaaatgttttgtaaaatagggaccctaaaggttaactctggcaagaataaaaataaaaatgatggtaatgattgtaacttaagaaagggggctctcattcgaatgaactatttgttccaatgtttcttcctgtctacttatttcatttctattttccaatcttaaacctctctttgaagcaaagaagatagatcccttgcccaaatggcaaaagtagtaatgatattcagaccagatggccttgctttgtttgtcaccagtcaaggactggctcagatttggaaggcgagatttttgtgtgctttctcagtaatcaggtgataacaccattttcctataatagtaaagggtaatagaatgcaaaaattgaaaaggcattttatgtaactccattctgccaggctctgcttttagagtgctatcattttctatctcagctgaagggaagttggaacacctttcaaatgtctgattaatttgaacctgaaagtctaagcccaagtcatagtccctatttgatttagccaggattatctgttttataagagctaacaagcaccagaaaataagtgcctgagcctgtcatcaataaaaatgtcttgctgggtgttcatttaattgatttttactgaacagtaaagcattgggattttttgacaagttattttcttatgaaattaacatcttaattaaaaacgagattatttaaatgggaataataggtcacacatgataagaaagtttaaaccagagcacagaaaagcttgattttaaaattgtcgttgtgtatttattctgcctcttaaagacattgcagcacgtttcatctaaaccagcttgctcaccattagaggcattgtcgaaaataaagacagtcacaaatatgtatcttgcggaagaagttctgaggaaaattcatacttaagtctctttgagaatgagaaatagtcgcattgtgtcaaaagttaattactgccactaattatatagacataattccacctgcctctaaaattcattcacttttggatcccaagcaagaaaactagtaaaatatgtggtgaaatggattttatagaagaaaatttggtcatccacataatgtccttggcttggtaatatccacagtaaccaagacctcttaaaagtccctgagaaaggagattcttaaaactcccttttctgtctgtaaagaatggttcagctcagaaaatttttaagagtgtacatattgccaattctagctgcttcacaccagaaacgcagtccaggaatccagtgcctctagagcttctgtcttcctctgcttaatacaatctcctggggctggggaaattttaaaacatgctgcttcagtgagatttacaggcatctgtctgtaagcaatgacttttcttgactgaaatgttatgctgagcttattaatttttatagaatgatgtatcctggcttccttacttaaatcttttctattgagagctattttgcctttaaaaaatattttcagtaacagaaattactcatttttataatggatttaaaggtgaagagaaaatgttttccagccgagtgtcatcatatatttttgtagacatgctcatagaagagtgcatcattttagaatcatggagtagacagctggaaggtctttcatttcccaaaaggcaaaatcttgaacttttcagaattggtagtgtctgctcacttctgaaggttttacaaagagaggcactttattatccctaagaagtctattcacaacttgacgtactccctgatagcagagacttccatccttagtaaatggatccaggctgactttgatcttctctactcttcctgttacacagtgacttagacagaggaggcagcacagcagaatgagtatacaaaatatgaagcttgactatatgcaatcagtccagaaatatgtcctcaacattgccaagagagaccttcttttcaaccttctcccaaatattgcttgttttgattattgttaattttatccagatatcactggaataaagttgtttcaaaagaaggtccacagtgtgaattttgacaagtctgcaacctctaactgatgtatgtctctttattgaaacttatgcttaattgccaatctaagtttttcttagtttaagggaagtttatattcttttgcttgattctttatggattgaaaatgaactggccaaacatcccctgccccataaaaagcttccatttattgagataataagttcatttttcttccctaagtctgatgcctcccatagccctttattataccttctcaggtcaggttgccctaggctctgtccctttatgcacctgttctgtgacagggagtatcagagaaagttccctgtgtggtaggctaatttcctgtgagcttttgtgcttgataatttctgagccagcagaaatttctccacatgtgtttgagatgatctgttcttgtttctaggatgcttktagccaaatctgttcctaaatgttgtgcagaccactgatgactccttttctatctatgctccttaaaatagtatcaaaggtcttagacaaagttccatatatttgtgtgtcatttacatagcttattcaattgttcattattttatagttttggaggaagtaggagagaagttatgggcctgggaatagcatgttgtaggggggcgtgttaaattacaggatctgtacataaaaacttcttaatatgtggtcaaattaaaacaaaataaacaaaacccatgagatctttcactctttccttttttctcttcttccctcctcctttccctccctctctctaaatttccctgccttcctctcttccttcttttgtggttgatatatagagcatgcaaacatagtgagagtaattaacagggtgatctgataaactattatgagtgccattgctccataggtaaagaacacattgtgggtacttttatgttcctcctggacagtgcattagggctgtccacagacagcatgagttctagcctcagaggcaattaacctacctctcaacccctctgggtcgttataaatcctctggaccagcttttctcaaacattaatttgcatacaaattgcctggggattctgttacctgttcagtaggtctaagtgagtcctgacatgctgtgtcactaacaaggtcctgggttctgctgccactgctgatgcatggaccaccctttgagaagccagggcaaagaaaagtttttttttttttaatattctcacttttacgtctgactattaaataataagacccattctaaaatgaaacaaaaaccactccatgttctgaagaaataagagctcagaaattctatttctaattgaggagaaagttataaaaatagcctctttcctcccacctcacccttaagcttgctgatgtgttttacttttcccaggcagttttcttagctgtgattcccactgctgccattgtctgtgcaatcacatccagaagaagggtcacggttacatggatctgctgggaaaacaattagtggaaaagggggcaaatagagttaatggccgtttttgggtgagtcctacctttcttatctcctttaggtcctcttccttaaaaaagagaatctattcttagagaaatactctttccctttgaagacagaagggtcaaggtttttgtttgtttgtttgttttcctttctcttcccattgatacccctaggaagcacaactaatctgttttaaaaattggggtatcaactgccaatgacttcttatggggatagttgaatagcctacgaaacattccagtctaatattmtatgactcaacaattatttccmtatatattaactttgtttaagatacattgaggtgtaaggtaaatgctacttcaattaaagactttttctaccaaacacagtgaggaggaacaaaaatctcatactttataagttggcattcccctcaactccttgcattatttgccccaaagaaaactgcaaaatggttctagaatcctstgtcacataggtccttcttccctgagttgcagtctgttctaattctgacctggcatctattttggttacaaaagttttcagtgtctctactctgatggagctcattccaatctacttttaacatttcttgagagcaggaccaaatgggagcaaatgattgtgtgcttctttgctgttttaaagggagccaagggagtctamacaatgagtatttatgtggcaagagttagtcctaggctaggactaagctaaaggtggtgaaaggtgaactgtgtagcatgggctaaattctggtcacgttatgctttcagataattcagagtctcctctctatccttgtagactactctccctgcccctagtacagatagtttatatctgtaagttggctaacatttaaagaaagtcaatgaattcagggtcactttttacccacaggtctgatgttccttagccagtactcatgcagaagtcctacaaaccataatggccaatctgaaaattcatccatcagaaaaaagactccttctggtcagcaccatggaacatgtaaccaaccagcctctgagatttaaatataggctaaataggctgtaagggagtgtattatctttcaagaaagatttcaaatagagttacacttaaaaagaaatatttttggtcactatgattttcagttttggcttagatatatcagcagcatctatttttatttcattcagtataaaaatttcttttggtattcctaggtaaaaattcatattcaatttaaaaatttgaagtaagtttttagcaaggtaaagagctataagggttaacccaattcaatatatattaaaaatttggaaacaaaaattcacacataccaatggatgagttagttggttagactttctgtacaaagtgttgtcaccggtattaatttttcatccttttcttatgaaagaaacccacaaaacaaatatggctattgtttcttattttatatttgtattaatttaaatttatgtgtacttaaaaactgttctttgtattactaagaacacccagaagccatgcaaatttgaagtgttgttcagcagttattgatgttcttatatttcaaataatatttaggctttacagattttatctttctgatcatgacaacaatattctatttcctccccaaatttgggcagttttacaacaccccttaaatgatgtcctttaggactgacagggtgtggatgtgtgtctattatgtgagtgtagttgagtgtgagggcaccggtactcagagtgatgttaaacaaggcacctacttggagagcagagtcttggacaaaacgtgggtaaagtaggtttgagtgcaaatctttgttctttcagccatatctaaatctcagattcatcttttcatctaatagtaataacytacctttaaggattgctgtggaaattagactatataatatcaaagaccttggcatctaataagtactccatgaatatttgttggttttccaactttaaaacaagctcattatctgacttagctgttatgtaccccgaatatttacctggatacagcataattataatatcaacaagaatttacagttaaagtaaagtagatcttttcctttcmcaagcagttttaccaacattatttcacagaattttacctcagcacttcccagggaattatctttcttctgtctattgcaggatccctgtaacaaagaaaaaagataattgatataaaatgctttgaaatactacgtacacacatacatatacatatttttagatgagacattgctgatataattctgaccttttcctgatatattgtakgtgtttctgaagattataataaaataaataaatgagaataatagatcataaaattaccaaattgatttcatttgaattatcatagttttctgaaaatatttttatgcttaaactctttgattcrtaaggaatacagtgtatgtttgtagatgtactttcctaatactaaattctgtatgaggaaatacaaaaggatttttttctaatgtaaacttgagatgaaatatacaactagaatctacagataacattattttaaatatcatagtatggatactcttcttttctccctctcatacaaaaataccattacctaattttctggctcactggaaaaggtgtggattggagtgaaaggaggtatcctccaccttggccttgccggaraatgtttgtgaattactctccatgcatttgaaatggtgtcaaatacagaatcatttgggactaaaccacattgcagggagatggcctctgaggcttacatgaatctgcctaaactggcctgtttgatcatcaagcacatttcagtgctgacaccatgcttggcattctgctaggcatggcaatcaatccttcaaagagaatgacaagatctgttatctttgatctgtcatttctgccaaaggaaaatacctaaaggaagagcaaaaattagtgaatgctrgaaaaggcagagacagctagattttgaacagcaccagtcatcttccaatgaaggaaggaggaaaagatggcaactggacatctgtaaggcagagtattaggccacccaagaatatctgttcatccactggtatatttaggctcatagaatggtaagtttgaaaggaattttagggaaccagagtgaggttctgaaacttgcagatggtcacataggtcttaaatcataaataataaaatctctctgctacacataagagacagggcagcataacagtaaagagcatgggttcagagaaagattagttttggctgaatccagtttctgcctcttagtgtctgtgtaatttggggcaatcatttaacctctctgtgccttagtttcctcatttgaaaaatgaggacaataatatactcatttcatacagttgttctgaggattaaatactgtagtctataaaaagagaatctgcaaatgcctagaacataataaatacctataataaataataagcactattattattaatattgccagcacagaaaaccatttccacttcttcatgttgtacaagttcaatgtatccatttataatttggaaaagttgaatgagaaccaagtcctttatgtgaacaaaagattatagtcaaatgaaaatgctatatcctggtgaacattcttcatacagcctttctagtgccttaaatattatcaattgaagttgttatttaagtagcagtctattcagacttctggtatgaagaatttgcctttaatggaaaatatctatgttatcytaagttatgaaacccagtgaccctggcttaagcattctccccagaagyttctactgtgtgctgagcacagaataaagatatagattgaagcaaatttatttcacatattatagattggaggcatagctatatgtggaagcaggccatgaaaaatgcaacctcaactttccttttgaacccatagtaawttatctcagaaacattgttgagttccctgaactgtaaggtaagtaacttgccccatgctttaaatcttctgtagggaataagtcatgsctgtgccttgtgctttaagcactgtgctccatggcttggaactgtgaacattacctggcatgcttgctttagggaggtgagaatctgaagcacaatgtgcttaggctaaattctccaggaaaaaaaatactttgtagatgaggaaggacattaatcaatcagmcacaacatctcatttaaggataaactgtcctggaggtactgaaacacttattcactcattcaaacattttgactactttctttattcatgtattctaggtctatttactgagcatctacttcatcgcaggcactgtatgaggcactgaggatgtggtggtgaatgcaatgaagtcgctctgcccrtggagctgactcttttggccacaccctgtatcagggatacacagatgaattaaatccaggccttctctgtaaggtgttctggataaagagagagaaaggaaaatggcagtagaatattgtgtgggactgctttgacttctgaaggccaggaagggtttcctgyggaaatgagtttcaagtttacttctgaagggcaaagaggagtcaatcagtggttattctagacagagagagtgcagcttttaccaaggcacacaaaggtgagaagaagctgccgatggctgcatggccagacaataaatctggagagtaaagagaccagaagatgaaaggccttgaaatcatgttacatagttttatactttatcctgggacaactagatgctaatgatggatattaatcaaggagtgacatgagcatatttcaactgtaatatagagaataggttgaaatgcagagaacggactggcagcaagygtatcaatagggagaatgtcacaggactaaacagatgagtagtgatgcagtctaaacaaagacggtgatcatggggatggaaataactgggaaagtttgaaaaatattatggaagtgattgcctgatagtgggcgataagagggagagtggaataatagttgactcccaggtttctagcgtgggaaactgcatggaagatgatgtcattcactaaaagacaaagacggaggagcaaattcaggataaggaactatgattagtttakttttgaacagatcgagtttgtgttgtctgtgagtcaagtaagtggagatgttcagtaggctgtagaatgtgcagtctgaagatctgaaaggagctacggactgatgttgtagatggcagatcatgggggcaggatcttagagaacactagcattgaaggtgtgagcacagaaggagaagatggagtagagagggacaaagggctaggtgacaaatcaagggtaaatggagttacagaaaagaatggtaaaatgggagaaggaggtctaagaaggatgatgtaatcaacatcaaatattgagaaagctcacctacagtagctgctcacagcacagtagrtgctaaagtttgtttattggatgtagtaacaaaaatgatatctattagtagagtgaccatctgtctgagtttgcttggaacctgttgttctagtatcgttattattaacaccttgtagtgcataagtttggataataagttaawtcatcatccgtgtcattgatcagtgtgaatagtttcagcagcatgtcacagatagattgcaatgagtgtagggaagaactggagaaggaagacattgggtaaggctgctttctgaaagggcttttggagaaggaattttaacatcaggtgggcattgagctagatagattttgaaacttcttacaattctgggaagagtttgtaatactattttcctttactgttatgagtcctcaaaattagtgagaagtaagactcttctgtttcttagagaacatcacagagataaatgctattttcttacaagttattttgcaaagccgatattttataaataaaattatttttattattctgttgtcttgaaaatgaataccagttacttttttttatctcctccgtatccaaagacatataaagtagaaatatgtgagatgattgtctctcttaagaaattactgttagtcctaaattaagcagagcaatcatcatttaagtaattttgtatgagaaagcattaccaataatgattagattgggagtaaatattctgcctcttactgcagataagattgacttaagaaagctaggaaaaataaatgcctctaagtttatttatatttagtgtgtcttctgattttggaaacttccaggttagaccaaacagatgtctgcaagagtttaagcatttayatttaaaataagatggaaacagtatgggtgttcctctgtataccattttggtggagaaatcataaaggatgtatctgaggggattaaaatatcattatcataagtaaaacagcatcttaggaaaacaggcaggttatatacaatggaaggatttttaagcccatatggacattgggttgggtagggagccaaccaagagtctcaagtccctctgctttcctagtaaaagaatggcaaatgcaaataataaagccatttgcaaatgtccctgtgagcctccttgcccattgttgaatttgattattggaggtcaagttttcagccataggcctgtccccacccccactcttcacacatactggtggaggactcctgtgagtcatgaacactggcrgggttaaaataggggaagtattttatagttaagatgcaaatggctggctttaagaaagtgggggaagggttatttctgtgaaagatacttctgtttgagaaaagaggccaatgggaagcaaaattttaccatagctataatttctctgccatatccaggcctgtgagtggtcccataaagcatgctgtcacagagaagtatcattctctcctctcactgtttcttaaggtaattaataaaagtgcatgctattgctaatctgatcaagcactattacgttaactagtcaatggaactgaaacgttcccaracatatttcaaatatttgcatgttagattttcaagttgtctataatcaacttttgctcaatactccattttaaggataatttatcatttgttctttggacacctaatctaatcagacccacagcctaatatactgtttttctatctaagctccaattaatttgcccagactttctttgtatcatctctcttctgtttcttttgtgtgtatttgtttttcagtaagcaatggcctcagttttgcttctgttttggatgaacaccaccacatagggcctgaatgtgaaagaagaccctctatttgtctgttccggggcagcctggtagtaaaacactgttgaatgggccacrgtttcagcagaccatcaggtgaatgggaccagtctctcttcttccaaaatatcagaagttaaacacttggaacggagatttggccaagatgacccatttacaggctggactcagtccagagactatagagaaagctcgcctggaactgaatgaaaaccccgatgttttacatcaggatattcagcaagtcagggacatgatcatcaccaggcctgacattggatttttacgtacagatgatgccttcatcctgagatttctccgagccaggaagtttcaccaagcggatgcctttagactcctggctcagtatttccagtaccgccagctaaacctggacatgttcaaaaacttcaaggcagatgatcccggcattaagagggctctgatcgatgggttccccggggtgctggaaaaccgagaccattacggcaggaagattcttttgctgtttgcagccaattgggatcagagtaggtaaatgtagatagtgtctttacttggtttttctttgctataagcattatcactgcatgtttggggttgtatggctttrtatgtaatgggctttcattaaaaaatatttcacatgttcaccaaggamgttttaggccacaggtgtgctgtcttcaaaaggcaattccagatggaacaatagaattgtaacattagagttgtaagagaccttagaagtcattattcttttcatcaaagtgggtcattcactttagtaaaattgaaagtggatcttctagaagaaccatatattctgtctttggtgttctcatctttaataagaaaacaaaaatggagttagtagatggcttaatatcaagtattttcartgcataaaataatttcttggatcctctccatgacttgaattacctctatttctcctgagtgccagacatttctatccaaatccctgctagacatttctccctgaaagacctataagggacccaaaacttgacctatcccaaactgaaagcatcatctttctcattctacctgctctttcatccacctagtctctcaagccagaaatccaggagccatccttgactgccccttgctttggtctttacatccaattaactttcaagtcctaccactttcttcttataaacttgtgaaatctcttcccttctctttgcttctattagtattgccttagtttaggttctcatcatttcttctttcattgttgcaacagcttcttagctagtatctctgcctctagtcttatctcttctgagtcattctaggttacaccgtagccagggtgacccttccaaaattctgttacatcacttccctgattaaagttcttcaatgacctgcaaagctatcgaaataaagtaaggttcttatgatccgccttctgcatttcctgctctgcttcatcttctgaccttcttcacatcctctggtccagctggttgggactataagccttgccttgaacagttaagctttttaaatacctccaaccctttggacttgacctgtcagacacccaaaggagagacagccatcccctatcccaactccaatcatccaactccaacaacaaaatttgcctactgatgcatctttatggtcctggaggaaggtagtcttcttctacttccctcccaaccctgttttctcaggcgccccacctctgtttatgtttctactaatgcagttacaatggaagtgtaacagctaccgttatcatagctaacattttgaatattaatgacaagctctgctaagcataaatatatattacctcatttaacccacctgagaactttgcatgrtagatattagtactatgacccctcttttayctttgatgacataaggcttttagaagttaaggagctcactcatgttacacaactagtgaatacggagtgggagttgggcaatggtagtctgatgtgagagccagttgtcttaacccgacttcattgtaattgtgtgtatactttgtgtattcttactcctcctcccacgactgcaggttccttgagggcaggagatcatgcctttttcatgtttatgtctttggtgcatggcgcaatatccaatgaatgttgaatgagaaagaataatgaatcaatttccaaaacatyacctatgaattgagctttcacagagatataatcattaacattcttatgtttcacggggagacatgggtttaacctaaaaatatatcaacccccataaccattaaaaggaatttctaaagtgcctcttcacttmctcatgtcactactcttcctcttcaagatgataacagtgtagggcaacttggtaatcactggctgttttgtggttgataatttggggtggggctgtctaatcttggaaaggtatttgcatatttcaacactatcagtctrgaatttggtcaggactccacctgggcctgggctacctttccgtgtttctactctgttattctgtaatgatatggaataacatatcatatatcatatcataattaacataattaatgatgagtctctcactacattgcttcactgatgagacagatttttaggtcttatgattcattcatctttatcattcactcaacattcagtgagtatagactttgtgccagagcttgwcttagggcactgaggacagygatgagaacatacaatccctgccggttaggaccccattgttcagctggatgcttagcaatggtgcaaacatatagatggctcactccaactgcaatagaataattctttctgagatacacaattcattggtgcaggacatcagtrtaaactagaggcaacagctgtcctcccaaaaatggcacattaacattttggattttgaaataggaaagtattgataattctggagaataattgtattagtccattcttgcattgctataaggaactacctgagactgggtaatttatgaaggaaagaggtttaattgactcacagttctgcaggctgtatagaaagcattgcgagggaggcctcaggaaacttataatcatggcagaaggtgaaggggaggcaggcacatcttcacatagtggagcaggagagagagagtgagggaaaggtgccacacacttttaaacgatcagatctcctgagaattctgtcaccagacagcactagggtgatggtgcttaacctttagaaaccacccccttgatccaatcacctcccaccaggccccacctccaagactgaggattgcaactcaacatgagatttggttggggacatggagccaaaccatatcaataattgtgctgacttcatttatgcttagttgttttcagtgttctagaacttccatctgctaagacagatgaggtagagaacatcagtaaatggggacacacacataaagwaatcagccatggtraaatattttattttgtgttaggatttggtccatgtatatcccaaagtatgttgttaagaagaggaaacaaatctcttagtaaataatccaaatgtttatgattatgataacctcaaacaaattacttcacctctctatttctcaattctctcttgtgtaaaataagaagtttgaactatgtaattcctgagatacctgccagctctaatggctcatgaatgtgaagcttattcagcctgatcctrtggatgggaagggacttaaaaattcactttatggtctcctaattcactagacttttcaaagtaatctctttttgcactctcccactccacatttttcaaactgtgcaatattatttgtcccagaccattatggttttaataaaaaggttgtaatgacaaggctattccattggcagccaaatattcgatgcaaacaagcctccgtttgaatttagatattgtcatgttgtttactggttatataactttcgacaagcaacctccctgaaactcagttttctcatctgtaagttgggaatgagagtgatgtctatctaacagtatggttgggaggattgaatgacataacgcactgaaaaaacacagcttgttgtttgatacacggtaagcactctagatattagcttctagtattatcactaatactatgaaagattctatgtaaaaagtaatagaggacagatggtaaaatgaattgcaaccaggggctggagtacaatatttgaaaattggaatggggcaatgaatgtgaactacggcatgcccatcctaagcacctgtttgctttctccccatatgtgtttcctttcacacagacccagccctgtggggcccaaaaggcctggaaaggctgacacagctttgcaaggaaatgacttcattctcaccaggggcctgagatgactgggaagtcatttgaatatctcatgtgaarggtttactaagattaaaatggttatgaatatttattaagacagtgtaaatctcattcatctggacccagacacatggacaaaagctcagaacagtgagcaatgggaaacactatcccgtgagggctcatgccagtctctscctgcttgggttcaacatggcaaccgaggcataggcagtgcctgggctacctgagcataaactggccttgcctgggcattggacctcagcagagagctaactgacttcttcattttttgaggctgccaggccgaaccaaaaccagatggattcaatcagctcgcatgtatttatacaaaaaatgaacttggccctcccagagtgagcagagtttttatcccagctccccagcttggtatgtaacggagacctaggggacactgctggtcgatgagccctctgatttttcccacctaaactcgtatcagcattggcaataattcaccatttgcccctttaagatctgatgaaaaacaaattcatttcttgcttctttctaagctgcaggcttgcacttggtcataagcccagtttgccatgaatgccccagtgctggagaagaaaaactgagcataaagggacacatcrgttttttttctggatttcactcagttaaaaggaaaaaaaggttaaaattggtcaagtaattttactttttagggtctcaattgtatcaagtggaaacagatatctggcatatggggctgttgcaagaattaatcacaattgccctttttggtggtgtccaaaggccaaatagaaaagtgatkaagtgcacaaactctgaaccccgatggccagcttccaatcctggctcctcctaacctgccatggggtcttgagcaagttgcttaaatccttattaccctcagtttctcacctgtacagtaggggtgatgagggtcataggtgagtaccagttggtgctcagtaaatgggaattgtttcttaagaaaaaaaatcaaatcaggcaaatacctaggatactgggtcaaaagatgtactgtcttttgtaataatttgttattgaggtaaaatatatatatatataatttaatatcttttccattttttagcgtacagttcagtggcagtacctacgtttatattctttgttcccccttcatcctcccttcccactccccttcccctctctgattaaccaccaatctactctctatcttcatgagattcacatttttacctcctgcatgtgagtgagaacatgaaatatttgtctttctgtgcctgaattatttcacrtaacataatggccttcagttccatccatgttgctgcaaaggacagaattcattctttttatggctgaataatattttgttgtatgtatataaactctattttctcttttttaacttttaagttcaggtacatgtgcaggtttgttacgtaggtaaacttgtgtcatggggttttttttgtacagattatttcatcacccaggtattaagcctagtattcattagttagttttcttggccctccctcctcccactctctaccctctgaaaggccccagtgtttattgttcccctttatgtgtccatgtgttctcaacatttagctctcacttatgagtgaggaaatgtggtatttggttttttgttcttgtattagtttgctaaggataatggcttccagctccatccatgtccctgcaaaggacattatctcactcttttttgtggctgcatagtatttcatggtgtatatccagtctatcagtgatgggcatctaggttgattccatgtctttgctactgtgaatagtgctgcaatgaacatacacgtgcatgtgtctttaacagaatgatttatattccttcgggtatatatccagtaataggattactgggtcaagtggtatttctgtcttcaggtctttgaggaactgtgacactgttttccacaatctttgaactaatttacagtttcaccaacagtgtataagcattcttttctttccacaacttcaccatcatctgttattttttgactttaataatagccattctgactggtatgagatggtacctcactgtggttttgatttgcatttctctaatgatcagtgatgttgagccttttttcatacaattgttggccacataaatgtcttctttttagaggtgtctgttcatgttcttgcccacttttctgtggggttgtttgttttttccttgtaaatttgtttaagttccttacagatgatggatattagaccgttgtgggatgcattacatgcaagaattttctctcattctgtaggttgtctgtttactctgttgatagtttcttttgctgtataccacattgtctttacccattcatctgatgatgagcactcaggttaattccatatgctggctattgttaatagcattgccataaacatgggagtgtagatttctctttaatatattgatcaatttcttttggctatatacccagtagtgaaattactggatcatgtgaacattctagtttgtgtttgttgaggaacctccatactgttctccatagtagctgttctaatttacatcccctccaacaatgtatgagggttcccctttctccatatctttgtcagcatctacaagatgtaccctctaaaggctgcagcatttgaggccattaccaggtttcctccaactagaaaagtatacaaaaatacagctgagaacccttagcggtatgcactatgggtacataagtgcagacggtcctctgcaaagacctctgagatagttcagttgtggttgagaagctctgagaagtcaccttgttttagtgatcctacctattatgtttattatattctcaagatataagaaatgaatggggggttgttggtgaatccagataataaaagccccagaatacactataatagtatccattagtgttgtgtagaccagctatggtccccaagaaccttgatggggaaaaaacagtggaaatgcattgcaagtcataatatataaaattacactgaagattcttttgtcagtgtattgtttgtttctcataattaaaagctcagaaatcagcaaccaggttgaaaactagatgaaaaattggttccttaaggaagaagaggcactttaaggatgagttaagttagggtaatttactagagaggaaagaaagttggtaaacaatttgattagagtcattgtaagaaggccaaggatccaggaggttctttctccccagaatacagarcaagggccgaaaggttggattgaagatgaagaagtatgaggaaggacctcagactcagggttgtaaaggtgagggatagggcaaaatttaagggggcaccaagaaactcagtaattaaataaataatattgtaataaaatattttaaaaacycacaatgcaaaaaaattctttatgaacaaaatatccaaattttatttatttactttgtaaagaaagcatgcttacatttgccttttattgctagattttttttattttgatagatttagggggtacaagtgcagttttgttacatggttatattgtttagtagcaaattctgggctttcagtgtaaccaccccttgaatggtgtacattgcacccaataggtaatttcttgcttcccctccccctcccacactcccaccttatggagtctccaatgtctrttattccacattccatatccatgtgtacatattatttagctcccatttataagagagaacatgtwatatttgactttctgttcctaaaatatcaaatttttaaagaaggcaggatcagtattattgattttcctttggcttcaggctccaacttggctcagagcagcactgctcagaccaatcagatttctcagaggaagaaccttaagttggctgctggtcagttatagtacagtacataatactgcacatatatagactcttcagctgcatagtctttatggtcctcaagcatttccatgtacgttttcttatttaatgctcataaccatttggcagtttcagtatcactaagttactaatgacataaaaatagtttcaggaggagaagacactttctagtcaagaagcaatatgactcatcaatgggaaaacttggctcagactcagagcttccaattacaagctcatyccaaaggcatctgaagccagtcactcagcccctgagtggttagatgtttcaaaatatccatggagcttctgaaagactgcaagtgggtttcttggcggagaatgagcatgtgcatgcgcgccatgagtcacggtggaggggatcggcagtctgggcttagtgcttcttagaaagagcacagtcagcagggggagctgctcaatgttatccggtagaaccgtattaagcaccatgaaatgcttagcatcccctcttccgggcactgtgataacccagaagacctccatatttccagcacccttaggggagctggggcccacctggagagccctcgatggagactgtctagaaacatcttaatatcagcatcaataactaccagttgttaggtgcttttgtgccaagtgttttgtatacactatttctaaggcctgccgtagtcccacaaggatctatgtttgtacatgggtactatgtaacagtgatggaattattccctagtctgtctgcacataaggactatgctttcccactaagtcctacttatgatctcattccgaccctgcactcagtttccaaagtctttttcaatcaaaagctgaatcaccggtatgctgttaagtggcaaagtagcccaagggtctaaattcaagtttgtttctacattctttcttcaagtccctctcccagccaagaggtagagggtggctcaatgtaaacaacgcagccattccgtgtgtattcgaatgggactcaggcagtgatgcgtgtgcattagaagttgggtccaccagaagtcgagatgattctgaagtctcaacatccagggcctattcagtcctcgatgtgagtgggaagaaagaaagtggagagggacttgttggttcagtttgaaagtgaaaggggtgctgaccaattgacgaggcttgttacgctttaatggaatgaatccgagtctccattccttcatgcactctgtaatacacatactaaatggttacagtcatctgtccttgtgtgtttcctgaaggttccaaggttgcattcctgttctgaactcatgatctcagaatgacatctcacagcagttctctcacctccaaacccctcaggcattaaatgatgaaaaaatgaatgttactaggatatttgaccttctttccttcacgattgtgaacatgaagacactgtcatatttactttctcatgtagaaaaacaccccaaatctgtttgttcttagaggacaggtgcttttccacttgcccttgtttctgggaaggtgttcagctgtttcttgtcccctcacgccttgcagtaatttatttgatggatacgctgaagacagcagcttcttcaaatgttaccagtcactgctgacctgtggcagtctctaaagggctaacattgcaaaagcccccacagctctgtggtgtgatttggcagtgggagatgagcattaagcaggttccttcttctgattaaaaccccgaggccgtaggtgggatataactcttcaaactataaataagcccactgattgaggtttgcctttggcttttgcaagagtgttaaagagctttttacaagtagcgggaggtctgtgcctcattcggtttgattgtcctcagttataagaacttgtagcatgaaaggggaagatttctaatgtatccatggtgaatattggtgaggaaagaagggaggaggcaagccagggagatgttaggcttctcaccagggtcatgaggtaaccctgcccccaaagcctattaagagaaacccaagaaaaggtttaactgtctgcccttcccaccaaaacatttcctgaatctttctggtgatgatcaatttttcttttgagtttgagaatgagtaaacataaactgaagagaaggacagttattacaaccataaaagcaaacaatattgagtgcttastgaggcagtaatgctcttacgtaagcactactaatagccatattttgcagatgatgaaattgaggctcagagaggttaggtgatctgtccaaggtcatacagctggcaagtggctaaacctggcaagatctcagacctaatttctcagttaaaacactgtgctgcacagcttatcacttatcactggaactcattcaccaaatctgggggctgcaaaatcagacattaacgacaggtctccatgagctatcagtaagcaagacttcacttgtcacttgaggtctcaaaatactttgaaaggacctcatagcccaaaagacaaatcctgttgccacatacttcaatctcacagaaacctagcgaaccaaatgttcaaaatccttacccaatgtctgccctaattatctgacaataggaacagtgatgacaaaaacaactttgatttttcttttaattccagcccagcaaaggacactggatattgcttgaaatgttttacaaaatttggtcctaatctaagcctgatttaagatagcgattgaaggcatcatttctgccttgcattgaaatgagtgttcatatagagactttctgttggcaaacagaatctcagctcagctgctaccagtgttgtgaccttggcaagatttgtactccttttacccttgtttttctcctttgtttggtaataatatgtattctgtagaactgtgaggacgaaatgaggtactagagaagaagaggtcagacaggcagatagtcatttcctttcttccataagtgaggtggttttcctattttgacctaatccagagcctaaaatgctcaagatatgatttctcattcagtgtaaagagctgataaaatacaatatgtctctgctgtgtgcttctgaaaagctgttgattgatgagggatgaagttaggagagtttataatgtgccttgattccggcttcctcgacccactgcatgtgtgtatggtgtgccatgtgtgtcaaccaaatagttctttgaatatttcttttattctcccttctccctctaacaatctccttgtcagatatactctaccactcactctctaattccacttcatccagggctcagctgctttctgcccaccatcaacgtgcccttacgattgcactcaggaccttacaaacttgtctgttagaagccatctttcccacagattggatgggagagcagttgggtctcggctcagagataacacaacagtgtacatccctgcgtgcccgggtggctgcccaccaggaagatgtcagccattacagggctccgaaaatgtcgttacaaaggcagtgtgggcttgcagtgagggggctgtactgacctggagaacaaggttttattgacagcatatctttccaggccagctgctcctctgaaattctcacttataaactcagaagttaaaaagacataacattcattagctcatagataaaaaagtctcctctgatggctagaagtccaagggcctaagaataacttcttccttctcaaagcaagtcccagtgaaggcagccaatgctaagctcactcaattagttgatttgaaattgtgctgcaatccaggagcatgacctatgtttgctcttccaaaggtcagtgtcagtaaaagagggcatgtagaaagggcgttttaaaaacacaatgttgcctgtatgctacattcactgttggattttgtaataagcatagctggcttcctgaatgaatgcattgcaagttatgaggccttttcttgcactgaagctcttctgggctattcattgctttccccagttctcaacaagccaggaaagcaagttttgtccccataaggaagatactgtagagccgagaaggaaagcccctggcacaagcccaaactccaacccccaattcctgtgcccagagcctcacctctataaccacctgccagctcccccgccctttcgatatggttcccagataatcactcagaacagtgatatacagaaccttaaacagccactgggaaagattaagtgcccatgcttcgctccagttgtaaatcaagctccaaagccatttattgtgagtgttytataaagcagtagaagttattgccactatcctgcaaaatataacgtcagataagaaagtaaagacagggtaaattttgttgtgaaggttttaaagtgatgtgttgttttttctttgcacattctttctgtttctcaccatttttctcttctctttgctactatttcttccctatctccaatagtccctgataagtatctccagatctaatttcaaatatggctttcccataaataacagcagtgcctttctggattacagattgttaatgttaataatgctcccaggcattgagcacctccctgagcatgtggtttcatttaatcctcaggacaatttatgaaggagatgttgttattctcattttaaatacagggtatttaatctcgacaaaatcgcaaagctcgttagtgctttgatctctctctccttcttcatgctgcctaattatgtttggggcctgctgtcagggattgtgccacttaatctctgatgactcacaatttgttgcaaagttcttactaaagaatcttcatggcttcctaataaaattggttcagtctctttgccatacattttggcacataaaaccttaatcattcagcattactttccttatccaaaggtcatcttccacttgagtcaaacaattctccccactctccccttctgctcctcctgcatcacagctcttcccaccttcgcgtatacagttcctcccattcagtcttcattcttataatgtggggaaaatggccctacatgagaagaggcctcaaacccagcggggaagctgggacctcagaggaatcatcctgcaggtcttgtctagctttaaggagaagtaagagtgagcaggtgaagggaagggagtgtgagggagactgcttgagacaaaagggcacaccatgtaagggtctagaagaaagagcttgccaagctggggaaacctcagttgattccagtgagcacagaaaataaggacccacatagtgacagttgaggctgaggaggtgggctgaggctgggaatggaggaatttgggctttatcctaaggacaaatcaagttctgctcatctttccaagctcatattcacacaaaggattggaatagatatgagcatgccagtcatttaggaaagaacacaggagggatcaatgctgcctcagccatggcaagggatgctcctctttaccttacactttctcgtgcttcctggaagctcctggagacagggaactgtgtcttttctccttggtatccatgagtacagtgcagggggcagtggtgtcctgttggctgcctgacttgtggggagaaatctgaaacaatgaaaagcccaaaccagggagactctttctagactcttcccaacaacagcattcctgttgagttgactggagttgtgtgcaattgaacttgagaatgagggaggaagagactaggatgctcctgcctagcccttgcctactgatccacagcatggcctaatggagagagagagcacatcgtcgaggcagcagtgggagcaagggcaccacctgggagtcatgggctcggcaggggctgtgtccgctatgtgacttgagctccgggtgccaacttcctcttctgatagtaaggatgtgcaagcagatgactcatcgctttctctcaactcacaaattttatattctttgtgtgtcattgtgcacaagacagagttaagaaaggcttcgacgttacagaaatctccactgttcaggatgctgcttttccatggagagcttggggaagggaagctttgtgaatggcttttttgtactcagtgtcccctttccctgacagggtcgtgtagattctggtgaatctcatgattttccgaggagttagtccgtcctataattttatagtatgcatcttgattagtatatcacaccaccatgggtagggtatttcactttgatatttgatctctaaagttttctgaaataatactgtaatgcctcatttactttaaatctttgtaagagaagagtgcattccagaaaaattaaatttccaagtcgttgaggtctacattttaaaggccagttttaaaattttattttatttagggctggttcaaaacacacaagcatacaaaagaacttaagaacttgaaaaagcaaaaataaaataaaataaaaatgaggaagctaaccttggaatgtattccgtactctcttcccttgttgaattaatactttcttcatgacgcatggtgactagagtgaatttaaatgattataccctgggctgtgaaccaaccatcctgatgaagattcttagagaattatgaagagctctgttcccagctacatgacccatactgccatgttttataagtctttctaatatcttttttgttgttgttgttacttctttctccttttagctgttaattcaacttgctgttaatgagcctgctttgaaaactcctctctttctaatttcctgtagattaggaagccagaaaactgagcttgttgaattatgtgttataggtgagaaaccatggggaatcccaataaataaagtaaatgatctgtagccgtgcatgaattttataacatctcatcggtatgcttggaaatgtagttgtgcccaatggaccagcaggcaagcatgaagtatcttccactgcagcatctgtttggggctgtacaaaacggaaaacctaggcagtttttcttccaaggtttctccaaccttggattcatgtactatgtccgtctctgatatttgtacttttcttctctctaatactctccccaaactaacagaaagagacttgtatcttcatttgaacttgaactaaaacccatttttaccaaagtggtgtcagtcctttgtattttcatttttagactttttgagctattaaagataaggcttygtctttgagcaaggatgtattggggagggggagagataaagtaacctatctttctgtttaccttttagtaccttccttgtcttccttccatacttactctaaggtagtgaaaatccaaatagtgttgccactgggcccattccctttggtgccctcatctgagctacctcctgcttattttcagggtggtcatcgtgatatacatgactgtgatcctgccaccatggccacaattttcatatttatactgctttggtccctccagtacccagatactcacagatagggacaagggcrgggacattgacaagggtcaccagctctacaacatcatagtgggggagggaaacatgggtcgtactttcttccctcaactctgcagtggtctacatggttgaagctgttgaataagtggcaccccttaacctggtttattctttttttatatatatactttaagttctgggatacatgtgcagaaagtgcaggtttgttacataggtatatatgtgtcatggtggtttgctgcacccatcaacccatcatctacattaggtatttctcctaatgctatccctcccctagcccccaactccccaataggcccgggtgtgtgatggtcccctccctgtgtccatgtgttctcattgttcaactcccacttatggatgagaacatgtgtgtttggttttctgttcctatgttagtttgctaagaatgatggtttccagcttcattcatgtccctccaaagggcatgaactcatccttttttatggctgcatagtattctatggtgtatatgtgtcacgttttctttatccagtctatccgtttgacccagcaatcccattattgggtatatacccaaaggattataaatcattctactacaaagccatatgcacacgtatgtttattgcagcactattcacattagcaaaaacttggaaccaacccaaacacctggtttattcttaacccgaggatactgacctttgctctacaattggctactgcgaatacatgaatctgttgaaatgtagacacgtgcatttggtggaagaggagatacccagcttctatcagattcttaagagcttcacaacccgaagaagtttaagaatcaccatattatattctctttctacttgttaactcaagagtataattctgtggcatactggggaggcaaatatcctattgggatagtattacagaatgaccttcaaatgaattgattgctgtatcctaactatgaagtgttgcatgattgtaagactaagcattctcatagaagaaaataatgaaaataaaggaagtgtaaggacattaaaaattatctcatcacttagatggaaccacagtttacactgagaattaagatatattttgctctctcacacatacacatacaattgagcatccactgtgtatagctttctgaatctagatgggacagcactgtgatgagagctcaggtgcctgtggctagattatctgggtgtgagtcagggctccatcactttcccattgcttgagcctagacaagttaatttaaacactctgtgcctcaattttctcacctataaaataaagataatagtatctacctctaagggttgtattgagaattaaaggagctaatacaagtaaaagtccataaaaatgtttggccccttattagcactcaataaaggtcaactatttttattattctgattttttttcacttaaaattatattgtggtcacttcattaggttactaaatgttgtcttagttcacttgtgtgctactataacaaaatacctggggcttggtaatttataaacaacagaaayttatttctcagagttctggagcctgggaagcctaagatcaaggggctgacaagttacgttgtctggtgagggttattctctgcttccaagatggtgtcctgttgctgctgcttccagagggcaggaatgttgtgtcctcacatggcagaaagcagataggcaagtgagtcaaatgctgggggaagccacttttacaatgaccttactccctttcctgaggggaggagtcctcatgatagtttaaaattcaatcctgggcattaggctatttccaatttttcaccaatataaatgtctttatatatggatattctcccacatcttcaatttttatcccctaggattaattccaagaagtggaattaatgagcaataaaaatgttcagggctcttggtccatgcagttttccagaaatgttgttccatctctatttccaccagcagtctatgagagcacccatttctccttagcaccgctgttggtctgaacaagtattacttttttcttcacttctccactttctcttctggtttagaagttatctatttctatattttacatgttatttccaaaatgttaatatagatgcttagcagtatattttgcttaaaatgtccaaaatcaatttctctgttctcatcccgaataaaaatgcttcagcttgactctgaactctcctatctttaaaaatcactgcctgctgtctattgttaccattgtatcattattcaacaccatggttactattattgtttgttattacttgcaatgaaagcctgtgcaaatttatcaaggtgttttacctgtgtctttgcycactatgaagccttgcacccgactcccctttgtgggttcatttcccttcctactgaagtaagggactgtagctagtaaactctcttaacaacctgtgtatgcttgaaaatgtcatttctcctttttgcttaaattatgtcagcgtgtatttagttataaattaaaattattttccttgaactctctgaagatgttaattaattgcattctgtttgctttagaaagcgtgttgtcagtctaattgctgtttcttcatagtaatctggtttttctctctagtggctttaactttttcacttgtttgtggtgttctgtagttgtgttaagatgtttttgatatcattgttttttaatcctgcctgacacttgatatgctgtttcactcattttatgtattctttcaacaaatacttattgaacatatactgcatgccagatgtttcctagataccaggaatacagagctgaacaagggagaagttctgttttcaaggacctgaagtactcttggaagagtttatagtcatatgctcagattttcaatctcaggactcatgcatttctgtagttctagaaaattatcttttatctctttattgcctcccttttattatttctatcttcatatgaaattcccatttgtctgttgccagaacttctcattctattttcaagacttttaatttttctttcatattttctaagtttttgtcttccagtacagcatttgggaaaacctcttcatctcctcttcattctctcccagttctgtactccagttccctaattttcttttaagccatatctggtcctttttgtttgtttgtttgttttaagagatgatgggggtcttgttatgttgctgaggctggtcttgaagccctgggctctgaagagccttctgctttggcctcctaaagagctggaattacaggcatgagtacctgtacctgacctaagtctcatctgtttttaattcagtgtctatagtttttattcttataatttctatttgaatattttaatactatttttcataatgctttatttttatctaaaatattctattttttatctttgaatattttaaacatacatattttaaattttcttccagattattcaattagctatagtcctggatgtaatttctctacctcttttggttgttgactctaccatggcatttaattttgtcatgttgtttgtggtttttgtcataagctcattgtggtgggaatgatcttctacagagtctctaagtgagtcctctgctgttagagcagccctattacctttctgtggcctcactaattctgtacccatttttatattgcttccttatgcaaggatttctataccagatattgggtattgcaccaattagggaaggttaaggattaatttttggttttggctcattatttccccccatggacctagatgaaagccccattctgtgtcatgcccaaagacaggaaggcaatgttctcttcactcctgttacaactaggattcctcacttccagctcctcattttatgtggggagaccagttttagtttcagtcccaaggccttgacttccatctcatcactatggaagtgttaaagccctaactcctgagaggtagatctggttaatttgctccataaggcttcaagaccctcattcctctgatgagtcctgcttatttgtgactcctggagatttcttagttttgactccaattaacacttttaaatgtatatttattccacatttctgtttgattggggaaaggttaatgctttatggcattagcttatgctgccaccttaagcaggatttctaatatagaaaaataaatgtatttttgcatatttaccttatatttattcaccttttttctttcattttcttgagtctcaaacatacaatcatatcatctgaaaggttgataaatttgttctctatcttaataaaaaagttatgcctttaattatttttgcatatggtctgtcataagctgataacagtgtgtcaaattcttctaatgtaactgcatttttatcaatttctcggtaggtttgcttccttaagtactatactcttctttatgtatccagcatttattatagtttctatccatataaaattatgccatttatccttctaatgattctgacttatcagatattaacattctgtctctacatacagctcttttttgtagagttatctgctctgcctttgatcaccttgtttcaagcttttctgtattttgttttatacacatttttataagttataattgttgtggatgatgttactgtttaaagattttttctttttgctatttatgtgctttttgtttgttcatttttgctgtatacattttatttttatttgctatttttctggcaatattctaaaagataagtttgttaaaaaaaaaagataagctttgtgctttcaatgacaatactggttaacttagatttttcaaagacaatcctagatctgtactaaattaactcttacagtaaatacaaaattagtagttttaaaaccatttgaattagttcatttgggtttctattacaaaawaccataaactagcatctaaacaacagaaatgtwtttctcacagttctggaggctgggaagtccaagatcaaggtactaacagattcagtgtctggcgagggcctgtctcctggttcatagatggtaccttctaactgtgtcctcacatggtagtaggagaaaacaagttctctagggcctcttttataagggcactgattgctctagagccctcatgagctaatctttttccaaaggctccaccttctaattccatcaccttgggggttagaatttgaacttttgaatttgggggttggggaacacaaacctcagaccatctcttgtggaagataagaagtatgatactgtttccctttatactagtttttcctttacttactctgtgttatggatgccatcatttgttttctattaacttaaaaataaaagtgatcttttcattcacttaaaaaaaactattgtaatcaattttataaccatttaaaacatgcttaaaacaaacatttaaacccatctctgcaacttattcatttttctgctcaatgtctgtttttccaccaagattttcccattctggaaatgtttgatgtgtttttcattgtcccagtgtagatttttcagtggcttattcaggggcttgccttggcaggagaattctgcatgcttcagtagctgaggacctgcttgtgttgttttcccatgtgaagggtgagctgatggggcacaggctctcaggctttatccacagaagttctgcggtggtttgctagcttgcctcccagcactttcacttgctgaggagtctgagaacaacctgattttgatgtggatttttttttctgggtgatctgatttttttttcttctggatgcctataagattctctcctattcttcttcttcctcttttttcttttcagatcctgaaaaattcccactgcatatgcgtgggaatggttgttattctgacattttgttttcttggaacataatgcaaactctacattctctacctagagcatttctttgtttcagccaacatttcccatattgcttcggctgatgactctcttgttactcttgttcagcagtagtgctatacaggtctaygcagttcctcctaccagggtgaccctcttcacatcagcttcttaaagttccagagatgtcatatcctctgggattatttaaaaaatgataaattagtaaattttattttattttcaaatattttctcttgtttcttataagaaatctactttagagggagatatatcttcaatcttctctccttcaagtttttgctctgctgtcrtattctcagtgagacttaccttgaccactcaagttagcattgcaatccctcttcctacttgtactccagattcccctgatgctattttttcttttccatacatctatcagtttctaaaacattgtatatttagtagtttgtttaacctatttttttatggttgtctttctttcacctgtaccctagctccactagaatataaattcccagaaggagaatagagatctttgtatgttctgttccctgatataaccaagtaccctaaacatcccctggcacagagtaggtgctcattaaatatgtattggatgaatgactaaattcttcagtgtgagtaaatatccagggatttattttctgtttgcatatatttacagaaacagatgtgttcttctctaatattcattacaggcatgtagaatggaaatatggtagatccctttggagactgatgtggatccttggcaagctcyttcaagttctgatagacataagaaaggaaaagtgcacattgactataaattggtgtcatccttccaaagattctgagcctcacatgagggatgagagatggaatgataagtaactggaatgtcatctctctcctgcacaactgcccctgtgtgtttgctctgggtgcctagagtttgcttaagtagtaaaccttagggacttccagtgccatcggtggtgtcaaaattctagcagctcacccaaagagggttttactcactttctcttattaagtaataaatatagagaagtttgttgttaactgaaatggaaagatagggcagctcttactttctggaaacaggaatggactattcataagttagaatgattcttcccatcttcctcagcctactcttgctctttttggaagcagtactcttctcatctcaattaatcaattaattaataaattactgcaagaaaactgaagatttctgctcgttcttcctttacctaaaacacttttcaagattcagtttaaaaattatcttaaatataaatattcaccagtctttccaaacaaaatttagtctcccttactttgaacctcccaaattttactgctatgtctcttgtggtactccgaataatcatccttaaatgtatccttaaggaagtgtgtattttctctctcctaatactttataggcacctaaggaacacgaactgtctcagctatgcattgctacatattattgcttgcctttcctatttcttatgattctgtatgttgaccaggtggctttttctggaagcccactcatgtgatgcattaatttgggagcagggagagtgtcatttaagtactgarctcagctggaataggtgggatggccaggcttctctttcagcccaggtttctttagggttaggattctcagggcagttcttcaagagggcaaaagcagaagctttgaggccgcttgaggtcacagctcctgcagtgtcactcctactccatcctgttgacgaaagcacatcacaagacctgtccagatacaaggggtaaggaagtccattccacytcttgagggaggaattgcaaagtaacattgcagaggaacatgtaggttgaaagaaattgttgagtcttttattgtttcaagatctatcctttgcccaaaataattcacacttctctcatatgcaaaatatagtcacattccaccaaaagtctcacctcaattttcggtgtcaagctcaaaggccatgttttgcatcagatccagaagtggacaaggcttctctggtgcagtgtcttgararcagtaactcttttttttttcaacttttattttaagttcagggttacaagtgtagctttgttacataggtaaacttgtgtcatgggggtttgttgtacagattatttcatcacccaggtattaagcctagtacccattagtcagttttctggccctctctctcctcctgcactccactctccaatagtccctagtgtgtgtttttccctctacgtgtctataagctcccacttataagtcagaacatgcagtgttttgttttctgtccttgtgttagtttgccaaggataatgacctccagctctatctgtgtccctgcaaaggacakgatcycattcttttttgtggctgaatagtattccacagtgtaaatgtaccacattttcttcatccagtctatcattgattggcatttaggttgattctatttctttgttattctgaatagtgctgcaatgaacatacatgtgcatgtttctttataatataatgatttatattcctttgggtattaatgtggtttggcactgtgtccccacccaaatcttttcttgaattgtgctcccataattcccatgtattaggggagggacctggtgggagataattttaatcatgggggcagtttcccctatacttttctcatggtggtgaataagtctcatgagattggatggttttatcaggggtttctgcttttgcatccttctcattttctcttgctgccaccctggaagaactgcctttcacctcccaccatgattctgaggcctccccagacatgtggaactgtaagtccaattaaacatccttttcttcccagtcttgggtatgtctttatcagcagcatgaaaatgaactaatacagtaaattggtaccaggagtggggtggttctaaaaagataccaaaaaatgtggaagtgactttggaactgagtagcaggtagaggttggaacagtttggagggctcagaagaatacaggaaaatgtgggaaagtttggaacctcctagagatttgttgaatggctttgacaaaaatgttgatagtgatatgaacaataagttccaggctgaggtggtctcatatggagatgaggaatggatattgctgggttgaattgtatttctgcctctaggtctttgagaaattgccacactgtcttccacaatggctgaattaatttacactcctaccaacagtgtacaagcagagaacagtaattctttatctagagatttgtggactaaaatgtcaagccatctgcccatacacccaacataccatggcatggataattgcaataggcacttctgctcacaataaggaagaagaggaagcacacagcagctcctagctctcaacaattttgaagtccaactgggccatattgcctactttagggacagaaaatgttctttgataggagcttgtttctgcatttttgaagtggtttcctggtttattattctccttggcaatttgttctgtcctctgggctcctggttctcccctctgagacatcttttcttttccttaagaaataacctatgtacacacacatacacacacacacacacatacacacacacagtaactatgtgaggatgtgaacatgttaggtaacttgattgtggtaatcatttcacaatgtatacgtatatcaaattatcatstgtacacctttaatatgtacaactttgtcaattttacctcaataagagaaataacctatgtttgcagctgagtagtgttmtatagaacattgaaggcccagaaggctctttgcattttggactagcagtctattttgttccaagctattagtgtttttatcattgtgactctcttaaaaacattgtgagtttcctatgagtcttccattgttcatgccatgcaccataagccacatctattcttgttttgagatagacttctctgtattttaggtggatagctgctgtgtggcaacaccttgagtttctcagatgttcttttatctagctgatagcatctactgggcaccatctaaaagctttctgaagttttaacaaagtccagcaaccatakctgtgatttgatgtttgtgttaggaccatctcatacatcgataattgtttgctatcaggagaaactgactatatgaaagagttttattttccaacccaacaagtcctggccttatacccctcctctaaagtatactaacaaactgaagaatttcctatttatagttcatctcaccctaacataatttatcatacatagaaaaatgtgccaaataatgctttccactttctgccgatccacaagtttattaggtacacttgccatgctctacattatctcagaaaacactcttgcaaatgtaccaccacttcatgacacgagttgcctttccccagccttagagatttccccagcccatagagatttccgtactgctcttccagcttttactaatagtcttttcactgcctttcagccttcatttgcaacacagaactaaaaccaatgtcatatgttttaagtctttgttacaacaaaggtacccatttgggtctgttgtgtacttttgaatagcaagctacatcaaaacttagtggcttaaaataacagtggytcattatttctcatgattatgtgacttgagtgcctggttctttcctgacttttggtgggttcactcattcgattgcatttaggtgtagagtcagctgttagttgagcttagcttagcttacctgcaagagatggagagcttcaggtagtctttgatcttggtcttctatacagtatagtggccacagagttccaagagagaaagggcaaaagttgtgaggtctcttgaagtggactctggaactcacagattcctggtaccacattctatttgtcaaagaaagctgcataaccagcctggtttgaagaggtgcaagaagcctctacctctgggtaggaggtgcagcataatcgcagtacagaggaacatgtcgcctgagatgggaggaatttgtgaccattaaacaatgtaccacagaaaccaaatcctcttagtttttgtattctctatggcataaagcagatcatctaacataaataagtactataatcgatatttattgaagtgaaggagaacaaaagaataattgaggtcaataattccaaatctgatgttctatatgaaatagacttaacattcagatactttcaaaggcattttcttctgatgatgtaggaggatttcactccacattataaatgtagccagaaaaatgctgattttatcttttaattctcaaaaaccgtaaaaacatgtttcagttcagctaaaggattttcgatttgacaactctcatgaatataatattcaggctatcattaagagtgagctaaagtagatctctttatgctggaagattcacacatatgaatatatctggccatatatgtctacatacatgaaaccattaaggaatgtagacagcatgagagaattaaaagtgaatcctttaggaatagggccaattttttctctttagtgaaaacaaagcattgtttacatatatattgcaatacattttttcttgaagtaatctaaatgattttaaattctaacaatttaaagtatctttggtgttgagcataaacacctatagatattgacatattagtgttctaattgtcatgataatgctctattgtttacagaatctcatttgatatttttacttattatggataaaacagtgaataagaaatttcaaattacttttagtactattatttgaatataaatattttctcttctaaataggtgctttaaaggcaamgtctacatattatctactttcccgtcactagttcagatcattacatttagttggccctcaatatttgctgaattaaatcaaatggagattcaagttcaaatttcaactatgactcaaaagtttcaactttttcatatgatttgattcctgtgtgcacattgaaagtaaatgtttttcagatgtgttcaaatgcatttttctcttcctcatttcaagaggtgtcacaaggccactgactctacacctaagtgtcyttgtacctgtgtcaggactagactcagtggcttaccccaacctatcaacatttaagacccctcacattattagtagcatggatttctccttctctatgcaacagactgtgcagtggccttctctggttgatcaatctgtatggattcaataatatccaccatrtgcctggcattaggaccctgaggagggaaaaagtaaaagtccctactctaaagacatgcattgtttaattaaagaaatatttacataaataataatatttgtaatcacagcagctaccatgtttttgcatgcctactctttgccagttgcattttacatgttatcttcctttcatccaagcacactgtaagttaggcaattgttatgcccaattcttgggtaggggaataggctctgggagtttcatgaacttgcctgagaccatagctgtagtaaacgggtgaagcagggattccaactcaaattcagtgtcacaggccatgcttttgctgccttctgatccagggaatagctggatagggacacgtggcagaaaatttagaaagaacccaaaataagagtgtgggatcccagctaaaggaaaagaggagagaggaattattgttgtgttttctaatggggtatgttttgtggcttaggtggagcttgagcttgaattgaaaggtgagggtcaacttggacacacaggatgggcaggatttacatgggccagctacagcttggtcaaggtgggcaggctgccctagccccttagcatatattaccagctgtcccctttcaccttgccttgcccagtctttttttttttaatcacttcccttatcctcatcaaagaactgtcatttctttcttcattcaaagcatcatacaaatcgattacttccataaagcctgctccagacagaaaattcccagatgccttacaagccctctagcatgcatgttcatttcttctctgccttagatagatttctctcatctgtgttttcatgttttcccacttacgttggttgtctctcagcaggagggaagtcccctggaagcaaagatttgtcttttgttattaactcccctctatcctcatcctgcactctatttacactggacagttgaaaaatgttaccaagagactaactcagagggatgttgaggggaataaattaagtcaataaaattatgaatggcaacccacagaagctttgctgaatggcataccatgtctaacatggaatttttattattgtgtctgcaagttagatctctgcattcttgtacttttatcttgtctttatttgcatttaaatagtttcttcccctctttaacatttctatattttctgttttttctcactttccctaataatcttctttcttttaatttaatttttatcaagataataatgtaagtcattttgaaagtcaaataataaaaacctttaragagtaggcagcatcttcctacccctcctcatctctctctctctctctctctctctcatctccttgctcatgggcaaataattttcactggcctaactgtatcttctagcatttacttgcatattttgaaatagcatgcacatactgctatttgttgattattttagttttagctattagttaataatcctactatgaaagtttgatcccaccttgaacataaatttcccctctttccagcctttccaaagagttaaatcaacctggtattcaatagatcagcagtgtgactacagctaatgttaatcagttggacatttcaaaatagctggaagataataattcaaatcttcctagcataaagaaaagagagagatttaaggtgatggatgccccaattaccttgattttattatatgaatgtatcaaattagcacttgtacctaaataaagtacatctattatgtatcaataaaagaaacaaaaacaaatagttaaatcacaatttgaagctaaatcaatatttgtcatttatattatgatcactttgtaaatattatttatagttgagtcacattaaaaaactcattacattttaaatgttcctttaagtaaaaacctatgatgacattcccttccctatataaccttttgccatcccttcagttagtaattgctttaataagaatttcttgactgctctatgcacccagtactgcctattgacctgggggacaagggccccttgtccttgccattagctttagactctaaagtttagaggattccctttagctttcccctagcctcagctttctccatgcagcaagatacccatggtggggagggagggagacatgcccacctgcagctggtaccactctacctttctagacattgcttttgaaacccaggaccccagaattccctgcccagatgatcccaattccccttcccggtcccttcttgcaaagctaggtggtgcttctgtgtgtaccatctccaaggctgaggactccaaggctgaggactgaccaaggagcagctgctgttacagtgtccacggacttgtgcaagaaacctcatggtaaagaaaggagctttaccatgagggttctcgtgcaagtccaggaaatagttggaaggggacacatggcagaaaatttagaaagaactccaaataagagtgtgggaccccaggtaaaagaaaagaggagaaaggaattattgttgtattctaatgggggacgttagaaaatacatgccccatttggatagcatgggctgcaggctggaggtcttctcactccttacccggccttccaatgtaagggaccagtgtgtgtgcactaaagattaattcaccttcagcagtgatgggactaaatctcctctcagtttggtcaaacacactgactaatatctttagttagagaagtctctccttttacagtcatccaaatccaccagccctgctgtacagatgtacatcacttctcttcttcatctttttcggaatcccttttgatttgtttctcctctgtgttgtctctgctattttctggatcccatggcatcttctttcttgatttgtcttgagatacactgcaggttgaaaaacattgtgtggtgctggactgggcttggtgtctcgtgcctgcaatcccagcactgtggggggctaagccaggaggattgtttgagcctgggagttcaagaccagcctgggcaacatactgaagccccatttcaaaaaaaaaaaaaaattagctaggcatggtggcatgttcctgtagctactcaagaggttgaagtgggaggatcacttgggcccaggagttagaggctgcagtgagatataattatgccactgcactccagccaggatccagaacaagatcctgtctcaaaaaaagaaaaagaaaaacattgtatggtgtcctcacactaagcttggtatcaaatttgtaggttggaaattgcttttcttcagaattttggaggcatttctcatttttgttaagcttccaatattgtcattacttccaatgatattttaatccttggtccttcacacagaatgtgaatctgtttttttctggagcctttcccaggaaacatttcctggtgttctgtaattcatattgctgtgtttggtctgggtcttttttatttactcagttgagcactctatgagcccattcagtctgaaaaatcatgttctttcatccaaaggactttcttactttatttctttgtgaaattccctcctccattttccctgggctttattattattattattatttttaacttttgttatttgaatgtttgatttcctggaattgccttcccaattaaaaaaaaaaaactcttttcttgccaattttggtttgtctttttgttctatcttcaggagatttcctcaacatgatcgtcctgtccttctctgcacttttcacatagggcataacacttcctctctaagtgtacttttttggctatggttgtcaataacatcctatcctgcttttcccccacagatgcagtgtcttctattatatctctgaggattttaattataattcctttttctacattttctcatttcctccagcttcttcttcttcttctcctcctcctcctcctcttcctcctcctcctcctcctcctcctccttcttcttctccttcttttcctgtaagcttgtttgttctccctaggttggaaagttttctcatgtgtcactgattcctggctgacaaatcatcccttggatggggtgcactaaaattccgtgtggaagttctgtccgcatgtgagggttctgccaactcttgaggttcatggtggcatggcagggcagcacgctagctttgcattggagtgcctccaagtgttagtatctataggtcttcatcctctgagaaaagtacccccaatctcttaactgagggaaaaggtggctgccagctttctgggggctgagtgagggaagggagcaggtggtttctcagtttgggatgtagactttcatttagctggatttggctccttagccttgacctttgctgtacttggcatcctgaagcctctcttttccagcaccctcagacagtagattcttcctcttctgctgggtgggatctgggtgttgcgctgctcctttaaacccttccatggactccccttgtgttagttgcttgtctctgccttcagagggactctacctcctgggcatttctaggagtttgtggtgcaaattgacttgctttttgctggcttactttctctggactgttacgacagtgactatttgtctatcagcttgccaacttccgaaatttgttgatacttctaatctgctatcatctcatatttctctttgttccctaagtttatgcattaaaagattcctttactcttatgtaaatggagttttaaatgaagaggagataaactcacaatttcttttttaatttttttgagacagagtctctctctgttgcccaggctggagtgcagtggtgcgatcttggctcactgcaacctctgcctcctgggttcaagcgcttctgcctcagcctcccgagtgagtaactgggattacaggcatgcaccaccatgcccgggtaggtttttagtaaagacggtgtttcaccatattggccaggctggtcttgaactcctgacctcaggtaatccactcgccttggcctgccaaagtgctgggattacaggcttgagccaccgtgcctgacctaaactcccaagcttcatcttccatcttcatgtataaagagaatctctaccaacctttatttagtttcgttcatatgttttgtttccattttcccatgattctgttcttgacgatgtgagttagcatttaaaatggctatatgaattatctttaatgccatcaaagttttttccacttcttttcatatgcatttactgattttgtttttattacattgcttaggaagcaaaaacgttcaaaaatatcctttcagttagggtaagaataagcaaaactatggagaaatttgaaagtttaataaagtttttacatacccagtggcaaataggtaaacaccatagtaagaagtacctacaaccaraaaactcctttacgtatcaaagctcagtcagtgaattgtgacagttgttaaatctttacaggccacagatctttatagggtcctataaagatttcaagaatagtagaggatgtgactagtataagaataactgcagcctgcaggaaaaataaaacagaaagaaaagtctgggaaattagaaacattgagtttcaaaaatgacaaaactaagcagtttcaaatttgtaccaagtgcttattactatgtgagaataaatatactgtcaactaaaaaccaatctggattagtaaggagagaccattcaaaaggattagagcaagtagaggacaggaaatgtcgcaatggggagaactctgggaacacaagatctgtaaactctcaaggattaggcaaaaagggtttgcttttatttttaacttttattttaagttcagggctacgtgtgtaggtttgtttcctaggtaaacttgtgtcatgggggtgtcaggttatttcatcacccaggtattaagcctagtatccatttgttatttttttttgatcctctccctcctcccaacctccaccctccaatagaccccagtgtgtgctgttctcctccatgtgtccatgtgttctcagcatttagctcccatgtagaagtgagaacatgtggtatttggttttctgtttgtgttagtttgckggggataatggcctccagctccatccatgtccctgcaaaagacatgatcttgttctttttatgtctgtgtagtattccatagtgtatatgtaccacattttctttatgcagtctatcactgatggacatttaggttgatttagattttcttatagggaggaatcaatgagattagaagaaccgggtgtgagaagtgggatgagagagaggcatgattggatagtagctctgatgccagccagcggctgagtaggggcctaagttcaggggccaggaggaaggagacactcttaaacaaatttggttaacaagcatttcattctgactgatcagtgggtattgatcagtggggacgagaagtttagctaaccatttataaggcaaagaatggaaatttggagggtctgtgtctggtcttgtcctagacaagcaagagggcctctgtgtcttctctaagtcctatgggaagagcgattctttgcagtcagctggttcttggaacacaaagggcaagggatttctccgcctttgctgttttcaggatcataggaatcaggtaaatttaacactgtccatatgagtaagcaagacagctattccaggaaagcaaagaggctaacatgagagaaaactagtgaagtatttccctacaatgtagtaagtggtgggacaaataaatatataggttgccatggtgatacagaggagaggcactttccactgaggggaggggtgggcagctgagctgrgtcttaatggatggctgggatctgtccaggtgggaacacaccatttgggccaaactgtaactgcccaaggggttcaccttgccagctgcctagacagagccgattcatcaagacaggggaattgcaatagagaaagagtaattcacgcagagctggctgtgcaggagaccagagttttattattactcaaatcagtctctctgagcatttgggaggggagcacaggttttaaggataatttggtaggtagggggaaaccagtgagccaggagtgccgattggtcagagatgaaatcatagggagttggagcagtcttcttgcgctgagtcagttcctgggttgggggccaagatcaagtgagccagtttattgatctggatgatgccagctgatccatcaagtgcagagtctgcaaaatattggaagcactgattttagaagtagtttagggagagtcagaatctgtagcctccagctgcatgactcccaaaccataatttctaatcttgtggtgaatgttagttctacaaaggcaatctagtcctcgacaagaaggaggactgctttgggaaaggacttttaccttctttgtttaaagtataaactaagtttctcccaaagttagttcagcctctacccaggaatgaacaaggacagcttggaggttagaagcaagatggagtcggttaagttagatctctttcactgtctgtcataattttgcaaaggcagtttcaaaaccagaaaatatcaccgaagatcatcaaaaccaaggtgctctgtaagcattgtgtacccaagcttatgcacaagtggatgagggagaaacagccttttctgatgagagattttcctccttagggctgttgtgacaattttcttcagagtaggagtctatttgtaaacatctagtaaaaatctagatgacatataagaatttatctacagtgtattttccaatttaaggtatatattgtcttctagcatcaaaaagtgtcaaactcctgctttattctttttcagaagcagaccactgcaaaaccaattttttttcttgcactgcaaacagagtataaaagctaggggagcagatatcaaagcatcccagatggggcacgtgttccctgcactttgtgtttaggcctgagttccttgctggaggaaaacctacttgttcatcagaatttaatcagcagtgacataaaatatgctgggtgagggacacttttggaggctcacaggttgggagacaagagtcagggaatagaggaatggctgcctgagggtaaaggcacagactctcagcgaatagaattcgctgagaaaagcaagaggacgggtctctgctgaaccctcattcccactctacgctgctaacctgggttgggaaactgcaggacccacagcaacccctaggagttgctatgacgccattcaaatttccttcaggatacagtctcaccatatatcctccttgagaacatgcaggatttaacctaatttgagattcacatttccttctcaggagtaatgggggtctgctttgttatttcttgatcactgtgacttttattttaacttctaaaacgctatagcacttgtaacaagagggaagcaaatgtcttcttccaaatatagaggatagtaaaacacaacatgtcctaaatgcagagccagactgcagcctggcagtgtttcagtggcttcgagtttggcatcatgcttcttcctgcacaaagggtcctcaccaccagagaaacctctgcccggcaccctgggtggtacaatagaagtgagcagaaccctccctggtactgggaggcacctcttatgggatccacagaggtctctgtgagagaaaacatgtgcataaaaggaggaaagaggccaaagcagaaagaggagacttacagaagctagtcaacaacaacaataacaataataatccaacagaatgggaaagaaaaggagccaaataccttaaaaataaagaatagcctagaaaaaagcaaggtaaagatagaaaaagcctgtgcatgtgaaaatacataaagtttgactaaggtaggtggtgcaaatataggtatctaagaaagggcaaaaaatgagtgtcatctgccagtaataaataaacaggaaaaaataaaacaaacaaacaaaaaaataaaacctcttctgtatccaaaactacagagggaataggttatggcaaaaagagccaattgggaaacataaggtaaattcagtactggtttttgtgggaaattcattgttccagggtaaaaattttggggctttctcagctttcatttctcagactgaatgcttgactacggtaactgacaaagatgatcaattgcatcacccagatttccacgttgactacaagatcagggaaaccaagctcctactctctgtctacaccaatccttttttagaccaaagtagtaaacacttttaagggcaggttcggccctacctatgttttagggcagtcccaagcaagtctgctgatatttcacgtatcttgtgccacaagtgggtgagttatgaaataatttccctgtgaggtagttccaagggccttgtttttgccctcttagcctccggtttctctgtatactttcagttcatatttaccctataattgcccgatgaacttggagcctagttcttggttcctggttcctggctaaggctctcccactgcccagcactggacagtccctctccctgacttgcgcagcagctgaatggcttgctttagagtgactgcccctccaggatttccgcccttccaaaagcacaaccgagacacctgccgagtttgagagatttcctctgctgtgttctgccttccagatcggccccaccagatccaaccaattgcaatttgtgatgtgggctgtttatgtgtcttcccatacaaccatttaatctgcaaaacaaatgtgtgagggtggctatcgtgatttttattttcaaaaggaggaaactgaacaccagaatcatgaagtaattcacccaaggtcaaacagctaagggagtgtggcagggcgggggtctagattctgatttgggtgacatcaggaactgacttgttctaccacatcatgcagaggamtagaaaacatcttctttatagatctcattctaaaatgacaataaagaaaacaaagattacagaaagtggtttgcctaagactatacaaatggttagtggaaaaactgacttttaaatgatctcctcacttccacatgatctcctcgcttccagacaggtaacctgcagaataccttgagacttggcaccctgatatggagcagtttcaacaatgttcagtctttatgtcctcaggaaaaggtctggaccctcaatgtcacacttggagcccagcgcgatccatcttctctcactttattttgtgtccctacaatgccagacacagagcctccatttctgcaaatatttcagttaaactgaattgttataggtttgarcaattttttaaaactctatgcttctttatttcagaataggaaaatggaaaaaaaaagaggctgtcatttgccacgcatttaccatttcagatattgtaataggcacttttaaattgaccagtaatctcctaaacttaaatgtagaccacagttacctgaaaacctccttaaaaccaaacatttctgggcctcacccccagagtttctgactccgtaggcacagggtggagtctgagaacctgcatttctaataaattcccaggtgatgctaacgctgccatgatcaggagaccacactttaaggctcactagcacaggcaatagtctgtacttacgcaataagggtatcaggatcgcagcacacatttttgggttccaaaaccatatgctcattccaaaaatcatgctcctccatatgcagcagattctcaaaggagcagctggcccggtgtctctctcctttstggtgtgggagccacacacagttctcccacactgaggtcagggctgamaaacacgccgagggaccccccaaccttcccctgccccctggctctggctcagctgtcacacctctgccccggggaggctcttcctctcagcctctgccccagggaggtccttccttgcttgcaggggagctcaggcccagtggcaacgcatggactaatttacagcccctcccttcctggctctctcaggtcagtaggcttggccaccaaagggaacackgtgtgtgtgtgtgtgtgtgtgtgtgtgtatgcatgtgagtgtgtgcctgtgtgtgtgtgtgtgtgcttcttttgaggaggctgaggatgctttgaggttggagaggggaagatgggagatgactcataaagactggtgggccagggcactatgcctgcagcctctggtagtgtcaggggaggccagcatgagctgctattgtgggggtcctctgcccttccctcatcctctgtaagaggaaacaggagaagcatggtggtcgagtgagaacacatatccgaccccttgcctgccccgtcccatcccccattccccagcaatcccagtcccttgcatggtgggcagggccacatggacagagcctcaaggcagaggtctaggagtcaggttttaatacgcttggaattttgcttaaggtgggagagatctttatattcaagcaattaagaaccaagtggagcttgactacctatgggcatttagcagctgtgagaggcatgcaagtggcccagcccagagctgggcctgtgagctgtcctgtgtctttgaaggtcacccatgtcccttatggggcactgacagaaccaattactcacctgtgcccaaggggacccctggacataattgagaggtactctaccaaattgaaatgtttggcctatatctcatcagcaagcaggtatgcaggagagtaaccctcaggcaagctgatgacctgagagaaggaaagagagggagagagagaaagagagaaagagggaaggagggagagagaaagagagaaggagggagggagaaagagagggaaggaaagaaaacaagaaagagaaaaargagaggaaggaaaggagggaaagaaagagcgagaaaggaaggaaggaagaaaaagaaatagaaaaaagaaatagagaaagagaaggagggagggagaaagggagggagggaaagaaagagagtgaaagaaagataaaagaaagagaggggtaaagggagtgagagaaagaaagagaaagaaagtgaaaaagagaaaatgaaagaaaggaagaaaaagaaagaaaggaaaagaaagaaaaaaggaaggaaagaaaaaagaaaaagaaagaaagaaaaagaaaggaaagaaagaaaaagaaagaaaagaaagaaagagagaaagggaaagaaccctgcattgccagaaagttaggagaggagaaagttaacataaacattacctcgcacatgtagtttttatggtgagaactcttaaaatctactttcttggcaattttcaagtatacaatacattgttactaactatagtcaccatgatgcacaatagatctcttgaacttattcatcctgcctaactgaaattttgtgtcctttgaccaacatctccccagtcctccagcccctggtagctgcccttctactgtctacttctgtgagttccacctctttaggtttcacatatgagtgagatcatgcggcatttgtctttctgtgtctgcttatttcacttaatacaatgtcttccaggttcatctatgatgttgcatatgacaggatttccttctttttaaggctgaatagtattcatatatatatatataccacatttaaaaaattcattcatccattgatggacgcaagttgattccatgtcttggctattgtgaataatgctgcaatgaacacagaatgcagataccatttcaacatactgactgcatgtctttggctatatgcccagtagtaggatggctgggtcatgtggtagttctatttttaatttttttgaggaccctccatattgttttccatgatggctgtaccagtgttagatacatttctaattggaatgaatttcaatattatattgtttgaaagcaaaaggaaattttggttctgattaattcctctctctttttaattggttcaataatttttaaaccctggggtgggtggaatgttttcagattggcagttttgggaatgtgaagacaatttgtatttcctggtttttgctttgttttgttttataactcagtagccatgctgtcagctcagtgcaaacatcacaggcaggatgcaagcactgaagataatagctttctcttaaaagtattgtcgataaaaacatacctttaatgcactgaaaagaataaattatgcctcgtagggaaacaatagaaaatatctcctttttggcttcgtgatcatttcagtgtttgtcatttccagccaccacaacaaaatgaatcctgtttcacatgttggtaagtccgtcattctgtctggagggaactgggtctgaaaattgcactgggactgaaattggacggcagcatgaarctgttaaagataatagacctgtgttaaaacccacaaatgaatggaggcattctctggcctgcagaagagcgctcattgtcctctgyggtccattttccacacgtacaatgtgttcacagctggctgttctttctcttttggggacacttgtgaatatgcatgtcccaaatcataggcacagcttaagggccaggaactcacgtccatgtccacttcctcaaacatcagagaaccctaatcagcttgacacccaccatccggtttcttcattctggtgggccctgtcttcctgggaatgcacacctccgtgaacggcaatccaagctgatttgttttgagcagtcactaagatggacatttcccctggggttgaggattttgtttcagacaaaaaagatacatgtaggagacagtctcacagtattttctatcttttaaaggtggaggtgaaagccagggttgtactaacagattgggatagagccactggaatctaactgatggcttttaagggaattttgcaaggctgaaggtgtgaatacccctgaataaaaacagctgctgtcttcattttgaatggatgctgaaatcactgccatttcctccaggggcttttagtgctgtgcattttaagagtggcgggttcaaaaagtcatgaaaatgtgttacttggctttccgatggaaagtaatagaatttctgaactttagctagccatctctgaacatcacaaattcctgaagggtgttcacaaggaaaacactaggaagtttgcccaaatctctctggtaggtgcacatgtggtaaagcgggtgactcttgctcttctctcttctttgaagtgtcctagtggggatctgcttttcaagaccctcctcctgctcagcctcaccctgactccattcagcctcctttagaggatgagaaacatctccccaaccagagccggcttaggctccttttaattgcatcattggcctggtgggaggatagagagaaaggagaacaagagttcagcagagccctgaaaaggggggatggtaatggaaggaggacaggactctgagctcctcgatggctaaagcaaagaaatggaattctgacacttgttgcctatatccgctctacacagagctccctgagaagcgcttgtctgccttgctctctatcttgcgcgccattccgcttttcgcactatgtgtccttggttttcttcttgatctcccagtggtgagcttgaaagtagcagctgttctctccgtgcttgtgctgggcctgcatctggcacagccattggcatacggaatccagttaacctttggcgaaaaacatgagcgatatttattgccccttttcaaacctcaattataacaaattgcaattatgtggtgcctcggaaaggctgccgtgcacatcacatgcagccatttagaaaagaactctggcatcctagagcagcaaatttggaaggaggacattctgaggcctttaggagatcaactgtgtgctggacggacttttcaagccataatgtaattataatgtgttataatttaactttgaaaggatagaacaatatccaaaagaggagatgtgttgggcaccaaaatgatcaaaggaaatcacagttgggagaagaatgaaaagtagagggagaaacatggacacaacatttaaaaagtctgaattttttaaatgccacctgttttcaggtattaacattggagtgattttcgtatctctacactcgatggagacttcactgttccactcaatttaacaaaacaaatatgacttcaaagtaactttgggtatattttatttagcattagctggtacagcatgattctgttaaaatacataaaagcactttcttccaattgcccagcccttgcccattctgattttctggttatctttggatttatagcaaaatgtttgtttttcaaaagataaaaatatatggggatgtttattggctgaagttctagctaagtattagaatgcaaattttattatggttgtaggtggctagtggtgaggtagatccacctttagaacaagtctaaagaatatagatgaaataatagtatgttgaaagatcagtcatttaaaaaccagtgggacgttgttgcaatggtctgtgacagtatgattcagttactgctgagagttcccaggaattttcaggatggcatctccagagctaaagacaatgtacttgtactacataatttggtgtcatgctcttttaagcaaatctgagtaatgaagagaagcatccaaaaacaaagaggaggattagaaacctaagacacaaaaatgttagcctaaagtcaacagtctgggcaacgagagctcaggactgggtcttggagccagttgcaaaattaatgctgaatatcgaagttctcaccacgttcctctgattctccaaagtgaaatcctcaggggacacctcttagaggcaaaatttttcattttggtgatatgtttgaggaaatatcaataccccgataacatcctaaaaagaaaatgctgtataaaataaaacatttctgctgtcatcatccttaatccactttaaatcttagtgctaggctaacggtatgaagaaaaataaaatctattttctgtcttaaaggagtttgttgaacatgatatacatacatacatatacacacattcttaatctaaaatagaatatggtcctatgccaaaggaccaatatgtgcaataataattgctaatatttattgggcacttaatggtaggccctgttctgagttctcttgaaggcatcaattttttcacaaaaattgtatggatttggcactatcatttcaatcatgcaggtgaggaacttgagacacagagaaattaaaaaaagaaaaaaaagaaagtttgaccaaatcagagctaataaattcattttactttttccatattagtcaggttggtcttgaactcctgacctcaggtgatccacccacatcagcctcccaaagtgctgagattacagccatgagccaccgcactcggcctagagctgataaattcagatccaacatccagattccactgtctggctctagagctcccacacatctcaatgactgtcgagagagaacaatgcaagattaatacctctttaattcagtaggaccaggcagggcaagaggcttagctcaaaatggcagggttagacagctccagggaatggagtaatctggttctactggataacctctccctcttccatgactctttagcaatctgctcagccctcaattctggcatgtggctgtatagactggagtttgtgcagctgtccctaatctcagctgtccaagcatggagcagaggacccgcatataatggggtacttcataagtacatgaataaatgaatatccaactaggaactgagatcgtactttttccctttttgaaggagctaattttattttttttcttggttcccatacttgccttaactgtagccatgggacttgcttctttggtaagtagtaatattaaaaccattttaaattgaagttttgcagaaagcatactatttggggactggccaraaaaaaaaaaaaggtgtaattccaaagaaagtggaaaagtaccacatagactggataaaatggaaaattatatttgtgtgacctactgtgttaccaaaaggcaaatgtggatttcgttggcttggatttgctcatctgctgctacacctccttctcgatgcctctttagtggcaattttctaaactatctttatgttcaaggttttaataaaaacaaatcctctgttaagctacatttgagagtgcatttctactgaggagcattggcccctgattgcctatccacaagagccaagatgaggcaagttccacttggtttctcaaggcagtaggccccatacacttgctactcattttcctttattataatctttgggacaatattttcccattattgacaataactcttatgaaaactccttataaaatcacatttacttttttattttcattctcaaagcaaaggctgggctgacattttcaatattcaagaatcccaatacgacaagtgcaatgtagtaggacgctctgataggctgaagggcatttggaaagctcacggatgcagaggacacccttttctaaaagcagatgggtgctcaggagcagaagcaacaattaaaagtcctggctgagaaagaaactcctaattacatttggatgacttgatgttccctcgaatatggtgcctgctcttttctttcttccttgattggagcctctaggggtgtgtgtgtgtgtgtatgtgtgtgtgtgtgtgtgtgtgtgtgtgtgtgtttggtttgacaacatgtgttgctattactcagttgttttagggaaagaatagtctttgaaaagggaagagatgggggaaagaaagaggtagagaagaggaaaggtgactgaacagcttctattcctacctggagagggctgtagatggtggcagcaggtgtcagagaaatgagatcttgtggctggcaggatcccttggggagaggctcaggagaaggcttagcttgacttgtggggacagatatttcagggaactcagccagctcaagagtgatgctgctgcaccaaacctatatgtgatttttaattattttaattgtttattcgagagagtgcatttatctctcttctgagttactttaagaagtatattggcctaatggactaaaaggtaaatctttgtccatccagtcccaaaaataaataagtaaataaataaatgaacttccaattttcctgtattgggcatttccctgaagagttattcgcaaatggtatagaatgtcagtcagcgtttcttaacccagggtgcctgcgactcactctaaacgattacatcagaatttcagggggtaaagcaagggcattagtgtcttagaaaaactccccagaggtgaagccagggctgagaagcactgctgcagacatttgcacagactcttctcttggtctgaaagtctccttggtctgaaagagcaaggagacttcacacagagaagcagaggtcgcagttgaggaaactaaatcgggtgagaaaataacagggatgggagtcttctggggacccttaaagccttatagatatgttgcgctcgctacaatataataataaagattcccagccagtcctaatgatgaccttttacatgtatctaattaaaaggcagcacacaattaatttctgtttgttatcccttctcactaggaaaccatcaatattatccttccctgatgcctccttgtaaactagttttgacttttttcccccagataaagtattcatttgacaaacactgagcccctccctgtgtaaggcatggtgccaagagcatggcagatcatagtcctgcaatcatgggtttccatctaatggcagagacagtcacacaaataatgtctcatctaactgtgtaagcacaaatgtgatcaatgttcagagagaacagggtgccaatgaatggaaagcaattgttgcagatctactctgaggcagatagttaagatctccatctaaaagagcaagggttgttctggaccaagagaaaacagcctgtgcagatgactgcaagtggtaaaagacatcgcatattaagagagcttaagaagggtaatgaagctaaaaaacaagagtttgagtagagaataatcccccatgttgtacaactaactctaaggagcatgaatcacaagagagggctttggcagcaccaagaggggacccctagttgcctgagatgaaggcacagacatgctgagccttgtaggtcatcctaagaaatagcagtagcaggccatggaggctttcagccaaggagcatctcagcagttttgtctctgaagaaattctctctgcttgtcagactgcaaggagtggaggattgcaaacctgaattcaggagagaccagtcctgacgctacttcctgcagagatgaagatgactgaattagagaggtgatggtggaaacgagacctgacacattgaaagctgtcactgcacaatctcacttacctgtgaattctaagaaattgtactcaaaggagcagagagtagagtgatggttaccaggggttggcatgtggggggctggggatattaatatatgttggtcaaaggatatagaatttcagctagataaaagggataaattcaagattatctgttatacaacatgttgtacatgtttgttagatgtttatacatgtttattttattagctcaatttggccattccatatatatatatatatatatatatatatatatatatatatatatatatatatcctgaagtatacattgtggaatagccaaattgagctaattaacatgggacttggtagtgcaagtatttcttwgacatactgatttcatatcctttggctatatactcagaggtgggattgctgaatcatatgatagttctatttttaattttttaaggaccctacctactgttttccataatggctgtaccaatttacattcccaccagcaatgtacaagggttcccttttctccatattctttccattaacatatgcattgcctcacctacttgtctttttgtgattagaacacaaaatcgactctcagcgattttcaatgtacaatacattgttattaactatagtcagcatgttgtataatagactcctgactttattattcctatgaaactgaaaatttgaatcctttaaccaacatctccccaaacgcaaccattgtccccaaatccctggtttccactatattactctctgcttccatgagtttggcttttttatgttctacatatatgtgatatcatgcaatatttgtctttctgtgtctgcttatttaacttagcaaaatgttctcaatcataggtgggaattgaacaatgagaacacttggacacaggaaggggaacatcacacactggggcctgtcatggagtggggggaggggggagggatagcattaggagatatacctaatgtaaatgatgagttaatgggtgcagcacaccaacatggcacatgtatacatatgtaacaaacctgcacgttgtgcacatgtaccctagaacttaaagtataataaaaaataataataataataacttatcataacgtccttcaggttcattcatattgttgcaaatgacaggatttcctactttttatggctgaatagtatttccttgtgtagatatgcctcattttctttatcagtttatctactgatggacatttaggttgatttcatattttggctattgcgaatattgcctcagtgaacgtgggagtgcaggtatctcttcgacatactgatttcatgtcctttgactatatacccagagatgggattgctggatcatgtggtagttccatttttaactttttgaggaacttttgtactgtttttcataatggttgtactaatgtacattctcaccaacagtatacaagtgttcccttttctccatatccttgctaacacttgtcatttttcatatttttgataatacttgtcctagaaggtatgaagtaatattacattgtggttttaatttttatttccctgatgattagtgatgttgagcaccttttcatgtatctgtcggccatttgtatgtctccttttgagaaatgtttattcaggtcctttgcccatttaattgggttgttttcttgctattaagttgtttgagttccttatatattttggattttcaccctttgttagatgtatggtttgcaagtattttctcccattctgtaagttgtcttttcactctgttcattgtctccttggctgtgcagaagctttttagtttgagataatagcacttgtctttttcccttttcttgcttgtgcttttggaatttcattaaaaaaattattgcccagactcatttcatggagcttttcccctataatttgtagttgtcaattaaaaaataataatttttcaaaagaaaaaaatgaaaagctatcaggatataaaaccaacagagttgggccactgattggatatgggtgagaggaggaggagggaaaagagggtcaaggacacctctcagatttctgcatgaaaacctgtgcttggggtggtgccatcccctgaggtggggaacagtgagaggaccaggtttgggtgggcagatggtacaggaaacataccaggaaggtttttttgtttttgttttttaggttttattttttcatttttctgtttgatcttccatcttaatgttcagaaccttcttaattttctgtttggaatcagtaagaaacaatctgaattactttgcaattctaatgttcttgatcccaaactcccatactcccctggtttggaaacgccaaaagtcagaaatagtaatccagaataaggcttcataaatggaagtttcacacagaagggattgctggttggtaaaggattgcctcctggctctctagcactccccaaacacagtgtaagtgtgcactaccagcttgtgtcttttaagttccatgcaaataacccctgaactgcatcaccgaggcacatgctgtctttgccatgtaagaatttttttcaggaaggtttaattttatctcttggatagactaatacatgtatggagtattaaattaactaaaaagcattaaaccatagcattaatatatgttggtcaaaggatatagaatttcagttagataaaagggataagtccaagatatctgttatacaacacattgtacatgcttgttagatgtttatacatgtttattttattagctcaatttaaccattacataatatataggtatttcaaaatatcatgtcctataccaaataataaatacctatttatccttctcctgagggtttttgaccactgaagagaatcaagtatcccatttgggtcattgctgacttctctttccagaggtctagttagcgtctctcacccaatacattttcttcaattctctctatctcccaagtgagctatttctcttacaactctttgtatttggcattatttgatttgtatcagaacatacttttctccttatcataaactactgtgatgatgcattgcaagagggaaccatttcaataaaccattaggagatttttggatcctgaatggcagttttaccctgaagataaggtaatgctgtaatctaccatcttgttaaatgtacacacacattcaaacaattgtcagactgcaggcagcttagaaaatacatcttctcttttccactcttacaccattatgtctttgtgcatgtgccctgaatttaaaggtaaagcgaaaatgaacagagmaattatcatgtagagtrgaggaaattaagctgagtaaaagcttttagttaactatgtgattcccagtcacccgcacggcagcagcaacagagagctcaggggcatctagtcatttcctgtgatggcttctgcacctctctctggctgtggagttgaatagtgattatataccgccactctggtagacatggtgtgctgaaggcagttcctaggtaagcctggggtgtatggaaggttggtgaggaattgatacatgtcctcatttgtcccaggaagatgtggttgtaaccgtgcttggtcagaaacttgttttcccttgcagatcattttatgggtatcctctgaatctggtcccttctctccacttgctcaggtatggatttttttctccaaaagatcccacatagtaggagcatcccaggatgttctaaataggaccatataaatgcttcagcagttgattacaaattctctggaaacaaataaaatattagaaaatctcagtaaaggaatagaagttataaaaaagaaccaagtggaaattatggaactgaaaaaatttaacaaaataaaaattttaaagtgtcattttaaacttgaaatgataggttcaataatagagtggagacaaaaatgataaagccactaggtttaaggacagatcaatagaatttacccaatatgaacagagagaaaatatactggaaaagtaactgaatagagactcaggctcctgtgggacaatgtcataagatccaatattcataggatcagcattccagagggaaaagagggagtggaatgaaagagtatttgaataagtaatggctgaaaacttcccaaatttggttaaaaaaaaatacaaacttacagatcccaaaagttgaacaaatcccaaacaggataaaacaaaggaacacacatcataatcacacacttataaacaaaagacaaaggaaatatctagaaggcagtcagagagaaagaacacatcacatgcagaggaacaccaattcaagtgacactgaattttcatctgaaaccatggaagcagaaggaggaggtacaacatttttcaatagcttaaagaaaatagctgtcaactgtgacttctatatctggtgagactattcttcagaaataaagaagaaataaagatattcttagataagaaaaaactaaaagaatttgttcctagcagacctacccttaaaagccggcaaagaaatttctttaaatggaaagtaaaagatagaagaaagaatcttgaaatatcaggaagaagraacaagaggaagagtagaaacatgtgcatayaataaactatcttttatctcatgagttttataaatcatatttgatgattgaaacacaaattctaacaccatctgctattcaagacagtgatatttaaaagagggaaaagtacagggactttaatggtaatgaagcttctatacttcattggaaaaggtaaaatgttgatactgtacctattatgtctcatatgtatactgtaatgcctagagcaatcactatgaatatcatgtaaagaggtatacccaaaaacactctaaataagtcaagacagaatcctaagatgtttaagtaactcaaaggaaaggaagaaaacagaaacatctcagaagaaaacagaaacagaggaatgatcatcagagggaataaatagaaaagaattaataaaatggtggacttaagccataacataaaaataattatgccaaatgccagtagtctaagagacagagattagcagtggattaagaaatcaagcttcaacaatattttacaagaaaatcagttgaaattcattaacgtagactgaaagtaaaaagatatatcatgcaaagatggatttaaaaaaatagacatggctgtattcggataaggtagtcttcagaggaaaggaaactaccatagataatgaaggaaattgcataatgataaatggatcaatccattaagaagacataaataagtcagccctccatgggttctgcatccacagattcaacaaatggtggatcaaaaacatttgaacaaaaaagcaataaaaaataacaatacaacaataaaaaataatacaaataaaaacaccaacacggcataacattcacatagcatttacatagcattaagtattataagtaatctagaaatgatttaaagtatataagaaagtaggttatatgtaaatactataccattttgtatacgagacttgagcagccacagattctgatatcctcaggaatcctggaaccaatttcctgtggatattgagagatgactgtttcttaaatgtgtgcatacataaaaagtctcacaatacatacagcaaaaactgatagtgcttaaaagaggagtagataaaactgcaattatagttggggacctcaacctccccaccctcagcaactgatagaacttagacagaagatttgaacaacgcaatcaaccaacaggatctaattgacatttatagaacacatcacacaacaacagcaaggtacacattttttaaagtgcctgtggaacattcatcaagatagactgtacctgaagtcataaagtaaaccttaacaaattaaaataaatgaaatcatactaagtgttttgtctgaccataatggaatcaaactattaatcaataacagaaagaaaacacaaaaatctcagaagacatggaaattaaacatacacttctaaataatctatagatcaaagaagaagcctcaaaggaaaatttacttctaaatgatttatagatcaaaaaagaagcctcaaaggaaaatttaaaaattatgtccaactaaatgaaaatgaaaacgcagcatatccacatatatgagatgcagataagacagagctgaatgggaaacaatatgagatgttgatattaggaataaggaaaggtctcaagtcaaaaatctgttctacttcaagaaactaaggaagaatgaaacaaaataaacccaaagcaagcagaataaaaaaaaaaataaagaaagaacaaaaatccatgaaagtgaaattaggaaaacaaatagaaaatccatgcaaaaagttggccctttaaaaaaaaatcaacaaaattgataaacctctagctagactgacaataataaaaagagagaaaacacaaattagcaatattggaaatgaagtaggtgatatcactacagatcctacagccatgaaaaggaaaatgaaggaatattatgaacaactttatcctcataaagtcaataacttagaaaatatgaaacaattccttaaaaactacacaacgtgaaaactcaatcaaggtgaaatagataatctgactagccctatagccttcaaattcgttgaattcataaatttaaaactcttgaaaaagacacttctgggcccacgtgcttccactggagaattttacaaatattttaagaagaattaacaacaagcttgcatgttctcttctagctcacttgatgaagcctattcgacatcactagttattagggaaacgccaatcaagaccacaatgagatacacgcctaccagaatacctaaaataaaaattataatagcagaaacaccaactgttgttgaggatataaggaaactggattactcatcaagattgccagtgaaaatgtaaaatagtgtcatctttctggaaagcaatttggtagtttctttaaaaaactgaaaaaaaactgtacatgrgattaccatacagaccagaaattacactctcgggcatttatctcagataaataaaaacctatattcacaaaaaagcctatacacaaatgttcacagcacctttgtttgtaatagccaaaacccaaaatcagcacagatgtctagcaacaggtaaaatggctaaaaaaactggtacatccataccattgattactactcaacaataaaaggaatgaactatttatatatgtaacaactttgatgaatcttcatgtaattatgttgactaaaaatgctaatccctaaacattatataacattcaatttctataacattttcgaaatgacaaaattttagaaatgaagaacagatcagtgattacaggttttagggaatgggwggagagagttataaaagggcaacatgtagggtctttgttgggatggatctgtttagtatcttgactggcttggtgaatacaccaatgtacgtcagataaaattgtatagaactaaataaacatatacacatgcacacatacaaacaaattattacaactgcatctgaatctacagttacctcaatttaaaaagtattctgttcttccctgtttctcctaactatgaagttggttccactcccacctacgcccaaaacaaatttatcttgtcaccactttctgctgagctatgatatagcacttgactttatcagctagagctcttgcagcaacatcaattggtcagaattggtactgaattcaactctattggcacatcatctagaaaacaatcttccagaaatatttagcctgaatccaaccaagcttgtgtacctcactccagtttaagaggaagaagtttctttttttttttacaccataaatatataaaatttttatttgtcaattcaaaatcagttggaagaaacaaacgagaaaaacagaagcacacagcgtggtggtttgttttttactatggtctttttcttttttttattattattatacttaaagttttagggtacatgtgcacaatgtgcaggttagttacatatgtatacatgtgccatgctggtgtgctgcacccattaactcgtcatttagcattaggtatatctcctaaagctatctctcccctcttcccccaccccacaacagtccccagagcctgatgttccctttcctgtgtccatgtgttctcattgttcaattcccacctatgagtgagaatatgmggtgtttgcttcttgttcttgtgatagtttactgagaatgatgatttccaatttcatccatgtccctacaaaggacatgaagtcatcattttttatggctgcatagtattccatggtgtatatgtgccacattttcttaatccagtctatcattgttggacatttgggttggttccaagtttttgctattgtgaatagtgccgcaataaacatacgtgtgcatgtgtttttatagcagcatgatttatagacctttgggtgtatacccagtaatgggatggctgagtcaaatggtatttctacttctagatccctgaggaatcgccacactgacttccacaatgattgaactagtttacagtcccaccaacagtgtaaaagtgttcctatttctccacatcctctccagcacctgttgtttcctgactttttaacgattgccattctaactggtgtgagatggtatctcattgtggttttgatttgcatttctctgatggccagtgatgatgagcattttttcatgtgttttttggctgcataaatgtcttcttttgagaagtgtctgttcatatccttcacccagtttttgatggggttgtttgtttttttcttgtaaatttgtttgagttcgttgtagattcttgatattagccctttgtcagatgagtaggttgtgaaaattttctcccattttgtaggttgcctgttcactctgatggtagtttcttttgctatgcagaagctcttttgtttaattagatcccatttgtcaattttggcttttgttgccattgcttttggtgttttagacatgaagtccttgcccatgcctatgtcctgaatggtaatgcctaggttttcttctagggtttttatggttttaggtctaacgtttaagtctttaatccatcttgaattaatttttgtataaggtgtaaggaagggatccagtttcagctttctacatatggttagccagttttcccagcaccatttattaaatagggaatcctttccccattgtttgtttttctcaggtttgtcaaaagtcagatagttgtagatgtgcggcattatttctgagggctctgttctgttccattgatctatatctctgttttggtaccagtaccatgctgttttgttactgtagccttgtaatatagtttgaagtcaggtagcgtgatgcctccagctttgttcttttggcttgggattgacttggcaatgcgggctcttttttggttccatatgaactttaaagtagttttttccaattctgtgaagaaagtcattggtagcttgatggggatggccttgaatctacaaattaccttgggcagtatggccattttcatgatattgattcttcctacctatgagcatggaatgttcttccatttgtttgtgtcctcttttatttccttgagcagtggtttgtagttctccttgaagagatccttcacatcccttgtaagttggattcctaggtattttattctctttgaagcaattgtgaatgggagttcactcatgaagttaaatggcatcaagagaaaacaataggctaagccaaaatttaagacattctacagggcacatggcatggaaatcatttttttaaagtcaacgatctatggaactttctttcagcttactattaactgtacctatattgatgcatacatatgcatagaggatagataaaacaaccatgcaaaatgatgacaattgttgaatcaaatggtaagtatatcactgcagtattttttcaacttttctgtttgccaggacgtttttttttccttctttttctttcctttttcttttcttttttttttttttttttttttttttttgagatggagttttgctcttgttgcccaagctggagagcaatggtgcgatctcggctcactgcaaccttcccctcctaggttcaagagattctcatgcctcagcctcccaagtagctgggattacaggtgcctgccaccatgtctggctaattttttgtatttttagtagagacagggtttcagcatgttggccaagctggtcttcaactctgttggccaagctggtcttcaactctgttggccaagctggtcttcaactgctgacctcaggtgatccaccatccctggcttcccaaagtgctgggattactggtgtgagccaccaagcctggccaccgggacattttcttaataaaaagttgctggaaacagattctgctgtctgaccgggattgatgatctttcagatcccttcccactgtgatattcagacaggaagttcaaatcttgactctgatatttattagctgtgtcctctcagtctcagtttttcttatgtataaagatgaaggatttggaacagccctaaaatcctgtttcttaaagtcaccagagaattgattcacaatctttcagtaacttactgacacgatgaagtgccaccacatttttcttccaatctggatctttcaaacagtaatttaaagacttcttcaccttctggacccaataaagtaggaaagaagataaagtactgacttctttaaatgtttgtaaaatgttatttgtttgaccctcacctacctcctttcctatgttagtcatttccagcaagtaaaatcaacatataattatattgtacactgtgtgcaaacacacacactgtgtgcaagccttgttagttttcccattatgcatatttagtcatatgtgactttcctctgtatctttccaaagtctatctgctcaggcttagtcgattttattctatctctctgaactgcccaatcagtatgtcttatccaagggtaagtcccacatttgatcagaattccaggcatagcatcatcattcttttccaaggtacagtggtgaacatgattataaagatttgggccaacacatatgctcacactaaattaaaacaaacaaacaaacaaacaaaaaacagctttgggaacagaggattgagaacccatcttcactattgaggtctgagtatgcccagaagagaggccacccaaacagagtattagagaaagagcaatagaatgttagaatataactcaagtgatcaagacactatgaggctgggtgttggatacatcaggcacatagatttaagttgtccacccaaatgtatagaaggccttatgaaaccttttccttttgtacttgttcttatttaagtatatttaaatgtatattttttctgtttttcttttaagttatggaagcatacgcagctatctcagcatattttcatgctgccttgaaaatttgtattattataatttaaagtttaatccattctcagttatattctttcttatagtcatatttcttttatagatttctgtttcctgaaattatcttgttgatacaaaagaaatggttctaaattttgccttgagaaatgtttttgtttgctgattacggtttattatgactgctatttacaaattaagccctcatcattcamagaactaagttaccaaccacactagctcaaagagttaggttcctgtaactggattatgtccaccacgtatgtttaagttttcagacctttttaagttggtatctgctaaagaattggaggagagagaaattgctcatttctaaaatgtgaatataaagatgtgtctctgtttaatgatgctagaaaagactttttttttttctttttttgagacagagtcttgctgcgacccccaggctggagtgcaatggtgcgaccttggctcactgaaacctctgcttcacaggttcaagtgattctcctgcctcagcctcctgagaagctggggtgataggcaagtgccatcatgcccggctaatttttgtatttttagtagagatggggtttcaccatgttggccaggctggtcttgaactcctggccttgggtgatccacctgcctcggcctcccaaagtcctgggattacaggtgtgagccaccatgcctggccagaaaagacttaaaatcaatttaggtgtaagagctctgaacctagtataaatatgactgcattttactaatagtcaactgggatcttgaagaagttatataatttgtttaagtgtatatagttaacctatgggaaaacctggtttccttttccccaattagatgtttttttgcagatgagtagcaaactggtgggcctgtgtccccttggcctgcttcattcactcacatgtcctgcctggcgttcctaggcatttgagttgccagctgctgaatcctgtatctggagctctttgggattacctagcacctgctatcggcatggccctgcactgaacagggataacacacatcccagcctctgaagcaacttgcaactctacagagccattgtaggcaggcccgcagggagtttgggaaagggcagacttgagtggaagtgggtagtactctgtgcattgagatctggaggaaaaaacacttaagagaccacttaggatcttcagttagaagaacacacctttcccactgcattaacaggccttcctggtcttcccagagaccaggatttgccgtgagtgactggcaagaaaatgctttctaatcacctttaaaaaacccaaaaaaaactaaagcagggttttatttgggacctagatgattctagaagtcccctttctccatttccaacccagaaatcctctgactatggaaagcatcccatagtcagtgataaaaatctggttgaacaaacattttgtatgcatgcatttaaaacagaattgccaatcaatcaatcaatcaatcaaaaacacaaatattaccttcttctaagagaggccagcccaagtaaaatttagctggaacaaactgtcttttggcttgtaaatgaataagctctgtgctcttctgagatggctttgtccaacttactggagctacataaattcagaagaagtttctgttttgttagatttcaagattagtctgaagtttttgtttttgtttttaaagtatgatgttttcttcttgacaactttgcattaggcataagaaagaatatgtgagatgccatttatagcaccgatgtggaataataaacacaagctctttcactgattcttgaagaatttgtgacgacttgcttaaataataagcaataaatgctatagttgattttctctaagagatgttgtattagtccatccttgtacttctataaagaaatatctgagactagataatttatttaaaaaaaaggttgaattggttcatagttctgcaggctgtacaggaaatagtggctgctgcttctccagaggcctcaggaaacttacaatcatggtggaaggtgaaaggaaagcaggcacatcttacatggcaggggcagaaggaagagagaaaagggggagggggtgctacacacttttaaacaagcagatctcactataagtcacttactctttatcaccaggacaccaccaaggggaaggtgctaacccattaatgagaactctgcccccatgatacaatcacctcccaccaggccccacctccaacaattgggattacaattcaacatgagatttggtggggacacagatccaaatcatatcagatgtcttcaagctttcaatgatgactaatgtgtcagggaagaatgcacagattagtaaaaaatgaatgtgtcctgtaagcatggaataataactgaaagagtctgccctactcaatagtatcccagctttcattttgtccacataatcccaagatgctaggttgtctcctttgtaaattaaatacctcaaaggacattctccaagccttttagagacttacttttccctgtctcatagtttgacacaactgtctgccttggctgcagagaaagctcattaggtcaaatggatgcaataagtcttccccatagcccatctctggctgtacagagagagttcttcagggtcttattttagaaggaaaaacccagtcttgattgcattcaccttattaggagttcctttatctcatccaccatgtttctatccctactttcaggccaactatcccatgtggaaacagctatccagatcactcatgtttggaatatatgcatgtgatatatattcatttattaatattataaaagaaatggtatatactggacaccttaaaatgacagtaaagactttgctcaagtgtgttgcaataggaagtaaaggctactgtaatagggtacagagactgaacacaactccaaatacaataggaacaaatgagaatttgtagccacaggcagagtgaggctgttgatgaaaaattactaggagaaacgtagtcaggtgtcaaggacagagtgaggaaaaagaggaacttgattaatatcaagggtaaggggattctcaacaaattggcttagcagagttctttgctaaaactgggctttgaaggctgagaacacgggccaagcatgaggcctactcaggaaaagggctcagagtttggtcaagatgggagtcattgtcaatactctgtgacttcctgtggtaggaaggtctccctaagaatgggacatttggccaagacctgaaagatgagaaagagtcagcccaaagtggagaagggaaagaatgttctaggtagggaagaagaggaaagaatattcctcatttcatacattggtcagtctccccttacagtcatttctttctttgaatgttctgtaagtctcacagacatgtcaagcacactggacctaggagtcgggaaccttgtacccactgtacacataactgttcatctggtttcactgagcccttccagatctgagtttcattatatgacagaaagaggttactaccatttggatggtatattattctgggggttatattgcacattgcaggatatttataattactgccctctgcccaataaatgctggtagtattctctaaatattctgaaaaccagtaatgaagtcccacttacattttcagaggtcccccaattggaaaggaggtgaatttacctccagttgaagatcactattaattacaaagattcctgttagctctccttgcctgattctatctgaattgcaaatccatctggaagaaccagcctccatcttaattcactctctccccaagctttcctgatacttcagcttgctgcagtcagcaattacttacaatatttatatgttgcctcagggttcaaagaattatgtaggtgggtaagtaagactcccgatttctgaatgtgggtgaaagagacagctcttttctctgggaaggttctatatgagccagaactaggaaagcgctccttgtaacttagttaatggaaaaaagataggtaacgggtcatcaacttgtagcaggcaaggattaaagcaggaggtaaaatttcagatagaactttccaggggctgagcattcacattttttcctcttttcccctttggaaattaaactgctgatctttctaagcagtcttctcaagggtttctctattgagaacaatccctgagattttgttaagataaatataggcactgacatccttctccagcaaaatcctaaatcctaaaatgtattttctccttgtgtgagaatttaaaatatgtaaattgtgtctatatacatatttaacgcattttccaaattctgtttgctattcagagtgtaggatattttggacccactttgaagggaatgtacgctgatgttttacagtatctcctgcagtgtagctactgttaagtggcagtgataaataataaccactggctctgattgcttagagaatttccaagtgataattygggatgtaattaaggaaaagaaaccaatgttttctttcaccactttcataaaataatttcccagtgagkcatcagagcttctgtgggtaatgttacctggtagagcaaaattaactctccaaacacacagaactttggataggaaaagtcaaccagtccattggattttgttgttattgttgctaaatgaactatgttgaccccatgttcctatgtttgttcttttgtgaacttattaaatgctatcttttgtttgtttctgattcttagaattaggctggagcctgtgttctgaccagggaacaaaagtaggtccaatagagctctcagcccactggtttatgaagagagtcagggagagggtgaggccactctttagtctctgtgacctacctgacttgggctaggcaggggcgccatgggtgtgtctgtgggcccttctctagaaaaatcctaagaactcccacatctctatcctgacacatctggtcctgccaattaactctcatatttacagtgctctaggctccaaatgactttggaaacctccaaaggggacttttctgcccaagttawtcacatactcacttctagaagaagtgttggtagcatttgcagaaagcttttctcctcaggggaatatatttaacctggttttgaaggatgatcaagccacctatcattattgttacttgttagccaccactaggcattacaggagttggtcaagaccaagagttctttccatcagccttgccttattggtgccaaaactcagaaatagtgtagtcagtggtcagggtgttcctgcacctcagagctgtggaagtcacagcagccttatatcctgatagctccaagaatctcataacaatgatgtgtcttgaggaagataaactgttgaaggatgatacccacatagaagaataccagcctgcaaaacagccaacaagttgcatttctatcaaaactgccttgaatgtattacctataaagataagacttttctttcagttacataataatttcctacagctcattccttttaatatttcatgaatttgattgcctgcctctgtttaagtttcttatgattaagaaggatagaatttgtaaaatgagaaaggataaaccaacttttaaaacttaaatcagactacagattctctaagttcaatccatttctattaggtgtgaattagccatatttttcagggttcagattgctcattataggcaactaattttagagscttaaggcttcccttggttgtaaaagcatgttatccttgtagaatgtattgatctctttattaaatacggaggtttggagttttcattggagtaggcaatttcctgagttaattaaaattatgagatgctgtatacttctaactcaagttacaggtgtgcttcccatgaaaagcaatacatacagagttgctttactaattcactatttaattcaagttgccttgcacactgttatcagagtttatgatttcagaaaggtacctcttgattgcaagagtgactgcagaatatcattgagagggaaggagctcaggagtgtaaaatcattcaaagcaatgtagtaccaaaggatagatatttttcttttaaaaagcctcatcatattatccaatttcttatcccaaaagtgattttatggttataagagtcaggttcaggagaaagaatattctatttcaggtagtgactagcacatttccatgaacccaatgcaagatctataaatgttggccaggtgcgttggctcacgtctgtaatcccagtactttgggaggccgaggcgggcggatcacctgggtcaggagttggagatcagcctggccaacatggtgaaaccccgtctctaccaaaaatataaaaattagctgggtgtggtggtgggtgcctgtaatcccggctactcgggaggctgaggcaggagaatagcttgaaccctgggggcagaggttgcagtgagttgggattgcaccactgcactccagcctaggtgacaagagtgaaacaccatgtcaaaaaaaaaaaaaatctataaatgtcaattgagtttcattggaagtaggagtaatgtgaccatcttacttaattcactcatgtcggggagattttgctgtttgtggctctgagtaggctgatatgatcctagctccatgcctagtgctcaagaaatcttcatggaataattaaagaatcatctccgaagtcatatgtttgtgattttagaagatgccagtttacagggtgtgtgtgtgtgtgtgtgtgcgtgtgtgtgtgtgtgtgttgtccatcatgaattgtgaaatcactctatgtcattagacaggaaggctgagacatctggtgacctactgcctgcttttggtttgtggatgtagaaaaaccctggtgtaaaccttgactgaaaatagaatggccaaaacggaagtgcttaaaccaatgctaatttagctgtattaagtgcttatttgcattcttgaaactcttcctagtttttacttttctgcagatcctcagccaagggatttactagaatagacaagcatgaaattaattttttatatttgtttagtaatagatgggaagatcatagctcacttccattgggatcattttttgttttgtttttaatttcttctgctttcttctgctgctgctctctatgggccctggtgcaatctctatccagagagctacatgaaataaacccttccccatttatattttgggctgtcttaaagtggtgtttgaggaccagatctttcccaatggctaagagtctcatggtatacaagccttcctgtttgtaagcatccatctagcatttgttattcactgttcttgactgcattttatcactgactgcattcacactacattaaccttatgtgaatgcaggcatggccctctcctaaaccagaatcaaatctgtttcctttcctcctcttggacccaaggtgctcagtaatacattgttctctataagcatgagtcataatagaaaatacttaaggacacacatcagacgtcagcaatgagcatgagaaactttgaagagtaaggaaattcaaccactagtgatctcagtgttggtcaaggcaagttggcaccatgcctaccttccttctttcgctaagaaacatttgctgagcatctactatgtataggtactggtgattgccagggattcaaaggcaaatgcatcaaacccccagcttggttggagctgatggtctagactagcagtgcaagcattcctttgttataaataggacaggaaatattctcttctgcagacgtggcacctgctcatggtggtattttatcacatttggtagacactaccagcccatatacttctgagtaacccttgacagccctgatatcaagtaatgttaatattaatattgtgtgatactgtgctgggtgctgattcctactatgtaagaactagtcacaactacagcacctctgactcacctcctacctgacttagttccttcagtccttcctctcttcacacccatatctaattggtacctaagtcctggctactatccttcatggttcctcccacatctctattatttccattcaactctcacccagtgtattgcatcacttccctttaatggagctgctcgactccagtcccctgcctttgatgcacatagttcctgctgccagcccaaatctccctgaggcacagaagccatcatttccttcatcagcataacagtcagcagttctcccaccaagcagaatgagatgaatcacaatcacatttctgatcttatttttaccttccttttcatttgccccattgcacaggaaaactttgcattccttcaatacatggtgtctacacgctaagctcttactattgtttatgtggctccttctgccctttcccttctatgtctagtgtccaaacctccccatttctcatgacccagtggaagactttccaaaactccccaatcataagtgatctctccttcttgtaattcccaagcactttgcaacccctgttactttctccttcatgtcatatttactcaggtaataatgagactaccatgaccatcagcactttctgtgcattaccatgagctgctaaggctttatgtgcactctgcacttcatcattaccagtgaggtgtaggtgctgtgatcctcctcctacagatgagggaatgaaaccacacagagattaagttacttgctaaccttacataggacagctgggatttaaatcagactctgccgaactctaaatcctcattgcctcccatgtacatatattttactgtctcctactgatttccatctactggcaggaaagtaaaattacttttttctctttgtgtcttccacaacgtacagaatcattaaatctttgtacaaatgcctcctgactccttattgcagttgcaggtacttcaacagttttaaaagaagacatcgaatagtaagaaattgcattaaattttgaagtgaagaaatagatgcatttgatgctgatttcattctcttcaattcttgagagaatacagaagcacctggaccaaatgtgataaaatgttggtttttatttattcaaaccactgctttatttaaatcaaagaactagagggaagacaacatctagggaaattaactgtaaatggtgagttattgcacatgcacacacacagtgatacatactctatttctccgcagaaacacaaatgaaaaaatatccwggcagattggaatttaaaagctttagtttcagtgtcattttaagtggtggatatgaatgctttgcactctagtgtctatatccagagatggataggcctgccaggagtggtctggagaaacacgggctcttatttccatgctgtacttgagagaatattgtcttcactgtgtttgtccaatattctctatactatttcaaagtcagggccttgttcttggacaagaacattaccctttgtgttttgtcctcagtagcattggtcagataggggtggactggggcagaggatgacagtccccaaactctctccatatattgttgccatacttgctagagagacacacatttgcaatgactctagctgtttttataaaataaacactattcttagtcaagcatctgtgaactgaactgaaccaaaaattcagaagcagatgaaataatgtagctggctccctgtctaaaactccacctgtgtgttatcagatgtttgaatataatagtattcaatacattatttctaaaaatctgatgctgaggctttgaatgccaagtattcttgaattacaattaataataagttagacaactcattattctggtatttcagagaattatattcttatgctaacacaattccaaaagtttccagtactgattgaaataagataaaattcaaagagatgaaaatttgcttgcaggattttttctttcctttcctttccttttgttcttttcttctccctctccctccctcccctcttctttctctccccgtctttcttccttttcgcttttctcttcttcccttccatccttcctttttcttcttgagaatatgagcctcatcaagttatgtgagatggagttaaatccaggcttctgttctctttgtgaccaattttgctgagaaaagtgattgtctaatttaagtttccagccaagattcagggtagtaaatttaatacaacattttgctaatattaattctactagagcaaagccaaacatttttcattagcacacttcttgaatctcatattttcagaacacaattttttttctttctccttgattacctcactgagaaataaggatttatttgcttaggagcatgatggcacacattcagctaaaacctgaattatgtaagagttattacaaaccatttaagagagtgtctcacgtgaattcccattttagacagtttttcaaagacccacaggcctagaagaggagaaaataagctcacctggaaacaaaacaattaaaatttgcacactccctattgtcctgctactatcatcttcatgaaaacagtgactaagagggatatctctataattcatgtaaatacaaatactgcctcctgttgggataggaggctccttcacacgtattattttggatagtgctagcgataaccctacaagtgtaagaaacaggaaattgtccattgctgaacttcagtttgtatggatggttgcatgtttggtgagtggcagatccacagtgttaagcccaatcacctttctcaagtacaggcccttttgccagtttgccaaaggaggatttttccccagtctagaggtcaaaatacatcagcagatgtacagaaggagcacatttgcctctccaccttggcttagacatcattatcagaggaaaggcaaagcacactctgaaactgtaagaaccacatcatagttattttaggaagtaattttggaagaagtttcaaatgagatgaagagaggaagacatgtggtgggatgcaatgttttgcacctataaccaagacatagatatttggcaaaaatcatctgcaaaaccactttgtggtttgtggtggaccttaagaaatttccaaagtcaaatcatcatattaagtgtgatgtcaagaggtttaaagacagaactgggcaaagagtttttttataaaaaaaattttattttttgtttttatttcaataaagttttgggggaacaggtggtgttcggttacatggataagttctttagtagattttggtgcacctgtcacctgaacagtgtacactgtacccaatgtgtacccttttatttctcattcccctcctatccttccccccaagtctccaaagtccactgtatcattcttttttttttttgagacagactctcattctgtcacccaggctggagtgcagtggcacgatctcggctcactgcaagctccgcctcctgggttcatgccattctgctgccttagcctcctgagtagctggcattacaggtgcccgacgccacgtcaggctaattttttgtatttttagtagagatggggtttcaccgtgttagccaagatggtcttgatctcctgacctcgtgatccgcccgcctaggcctcccaaagtgctgggattccaggtgtgagccacgcgcccggccactgtatcattcttatacctttgcatcctcatagcttagctcccacttctaagtgagaagatatgatgtttggctttccattcccacgttacttcacttagaataatggtctccaactccattcaggttgctgtgaatgccattatttcattcctttttatgtttgggtagtattccatggcatactacattttctttatttactcgttgattgatggacatttgggctgattccatatttttgaaattgcaaattatcccrctataaacatgcatgagcaagtgtctttttcttataatgacttcttttcctctgagtagatactcagtgggattgctggatcaaatggtagatctacttttatttctttaaggaatcttcatgctgttttccatagtggttgtactagtttacattcccaccagcagtgtaaaagcgttcccttttcaccacatccatgccaacaactattatttttttgattatggccattcttgcaggagtaagtttaggtattgcattgtggttttgatttgtctttccctgataattggtgatgttgagcattttttcatatgtttgttggccctttgtatatcttcttttgagaagtgtctattcacgtctttagcccacattttgatggaattatttgtctttttcttgcttatttgttggagttccttgtagattctggatattagtcctttattagttgcatagtttgcaaatattttctcccactttgtgggttgtctgtaatagatgtcttgctgcagcacaaaaaattagtacaggaatatgccctgtgatttcagaattgactaagaggctgcctcctattccttctaaaaaaaaatgtctccttcaactccatcatatctttacatggttatctgatcacttatagccttatttttcttatgagtctagcactgggatcaagttctggaatctccactaaaaactcaaagcacaaatgggccatgttttgaaatttgaatactttctcattggtaagaacttactaatttccactattttgtatttcatttgtatggtgctgttgacttaggttttaaagcctcaggtgcttaactcgtatatacaacagtagaacctaaaaatgagtcactattcataatctctaactgctcacagtataatgatgaaacccctgtagataaacatttactaagtcctaacttgtataaaatcctttatggggaaaaaatttaagttttctattttctgctaatagagttctctacatttcactggcaatttgcagttcacatagtcctctcacatacattatcacatttgaacttataattaattcaaaactaatatccataactgactgtataaatgctatgcaaattatagaaaagggtggaagaaatgtaaatatccatttgtcatgttagttcattttgatacaagtgctaaaatactctgatagaattgtgattgcaggcaataaaataaatcaaaaaaaatttccccctgagtttttggagtaaaaccatatataaatgtaaatgatttggtagaatgaagaaactctagaaatgtcttctcttctcatttctgcaatttgcataaagtaggtgaactgcttatgaccattttggtttgcttaggatccttgttagaatatttatgaagatttactctggcagattataaactctagaaggcatttattttttaaaaataaactttttatttacaacaatgttagatttacacaattactgtgaagacagtacagagacttcccctatgtcctgccttctaatttcgtctattattttcagcttatagtagtacagtgttactgttacgactaatgaaccattattaatacgttattcattaatgtccatacgttatttggatttttttttttttagtttttacttaatgttctttttctgtcccaggatcccacccaagatcctacattacctttagtctttatgtttctttaggctcctcttggctgtgacagtttctcagactttcattgttttttgataaacttgacaattttgagcagtacctgtcaggtattttgtagaatgtccctcaattggaatttgtctaatgtttttctcatgattactcttgggttatatttatttgggaggaagatcatagaggtcaagtgccattttcatcaccttaggaagaataaatacagtcaacatgatgtatcactggctaggttgagctggatcacctggctaaggtagtgtttctccactgtacagtaactcttcttcctctttctatactgtactctttgaaggaagccacaatgctcagctcacttatggagtggggagttatgctccatgtttttgagggtggagtatctacataaattattaagtctgatagccattttaaattttaaaaagctaggagtccagaagtcaaagggtgttataaaaagcgaagaggaaaacaacgaggaaattcatacaaggaagccaagaactaaggaaatcaaggtaatgactgcagctaaggtaagaggtaggcttacactcctccacactggcaaagcttcatgactcaagacacagtccgtgcaactctttcctgcctgcccagtttctctggaaaagtaaagcattcaaacatttggaaactgtaatgaagtccataaaccttttacttttctcctgggatcatcccaggaacataacatttccttcactgccagtgcctgtgctgcaataaaggttgtggtctccaaaatgcatagaatggtttccaggcagagctcagtattttctcttggagtgggtaagtgtggatatgtgttgaaaagatgtgccagcttgtagttaaaggagtaaaatgagatagagattaagtaatttgcttaagatcttcaaagttaattatttctatcttcaccattcaactaaaagtgctctcccacaacccccaaaagagtatttgctgtgaaattcaatggtcctttctccttcctattctccttgatcttttttcttcatttgactttgttaactaccttttggtgttggatagctattgctatgtaacaaaccatctcaaaactctgtggcttaagaaagcaatcatttattgctgcttatgcacctgtgggtagctgcagtttatctaggctgggttcaactaggtagcactacttctaatgaaaacctgctagttggctggggagtcactggtctgtgtgtctttyacccttgttcacagttcagcatgctggctgtcgcatattttttactatagcaacggtagaagggcaagagaacagtggtaacatctgaagtctcttgagagctaggcttggaattggcatcctgtcatggtgccagtggttaaagttacaataatgtttactgtcaaatcaagtcacatgaacaagggacaaaaaatacactgtatcctcaaggaggccatagctagtgtgtggatacagggataagtgaagaattggtgtcagtaacacagtaatgcaatctgtcatacccttgcttcttgaaacattctcttcttcttctttttcttttttaacagaaccttgatcctctccccttttattatttaattcttcctccttcaacctcagtgctgtatgtaagctttaccttaggcttaacctttccatcctgactttctctgtgtttatgctcttcctaagaaagcttatctcggctcagactccctgatgccctaatgatcatttccggtttaccaattgggcatttccatttggaattgcctaaattcataatctttgctcccttgttcctcttaaatcaatgtttgcttccaatacaaagctgtatctctgaaaaagacttgggtctttggataattgttttgatgtgaaaggaaaaacaaaagcacacaaagtcccaatgaaaacctattctacaacaacaggaataggacatctctaaaaattaaaagggaatatatctgaaaggaaaccataatgacaaaaagagtattaagcaccattttctatgagaaaaggttaaagttacaattttttttaatctagagattatgtagggtatcatgaccaccatgcttagatagttgaaagtgtgtggtgtggggagacttgagggttttttctatatagcagaactacccccactgggtggatttgaaggaggaaaattttggcttaatataaggaaatgatttttagtaagaagaactatacagaaacagaatgggctaatatctttattttttatctgtgtcacttctctctcctgaaaaagtcttgctcccccttttcccaattatccrtaaaattcctatccattcttcaagattatcccgagccttcatccctccataaactcttccctgactactcaaattgtattgattcctttcatgttgctaatctaccacccctccccaactaaaataagagtcctttgaaagtagaaataggacattctaatttataactttaagcataggcrtaacactgagtttctaccaggcatttagtatattcttagtggcttgcatttttttttttttttttttatgagacagaggctggctgcaactcccaggctggagtgcaatggcgcgatctcagctcactgcaaccttcacctcctgggttcaagcgattctcctgcctcagcctcccaagtrgctgggattacaggtgcccgccaccacgcccagctaatttttgtatttttagtcgagacggggtttcaccatgttggccaggctggtctcaatctcctgacatcaggtgatctgcctgcttcggcctctaaaagtcctgggattacaggctttagccaccgcctggccctggcttacatttttatcacagatttcctgatttctaatctggagtcattggctttgaaccagattggaatgctcaagattctgattgtttcacactgatttcacaagaggacttggcttctgattttaaggaaaacttagggggagtagcagattttgccatcacttgccatccaagctcatattttcctgctcaccaaagaaaaacactgaatctagagatcctctaagatcttagatttatagctcagataatttactgagtgaaatagagtgaatttgccatcacttcttcatgtctgaaaattatttaaaacaaaaatcacgtggcaaatgggcatatatgatgtggaggaatacacacagaactggagagctgtcattctagtttgtattcaggtctgcctgttgtcatagttactgatgtactcaaagcgaattccctcccaaatcacactctgtagaccttcactgaaaataagtcatacttcctgttttatttttctctatccaagagttgaagctaaaaaatagcatcaatggcatgaatgtttctacattcttagcaggattttttaaacataaaggaaataaaagagctttcatcaaaataaacacctctgattgaggcctcacctcatttgttcagcaatgattcattgtactggggaaacaactatgattatggcgcaatccctaccctcaaggacatcagagctstgtgagggagaaagatgggtaagggatgcatttcaacaaaatgcaattggggctgtggaggaagcagagtatggaaagccacaggaacacagaagagggacatctcattaagtttggggtgcagagccaagggaggtgtccaacctgcaagtcttgaagcattatggctgtgaagtttagcaaatgtattttcagtccctttgggtacaggacgccagtgtgaccctccaggyggggttcatggagcagtggcatgcggaggccagcactgttgcacgcaacatgctatcacctgctcatattcacacacagctctcctttctgctctggctgcaggaactccttcacagacatccttcgtgccatcctgctgtcattggaagtcctaatcgaagatccggagcttcagataaatggcttcattttaattatagactggagtaatttttccttcaaacaagcctccaaactgacaccttcaatccttaaactggccattgaagggttgcaggtatgttcaatgaatgcgcaatacaagaccatgtgtggcaacatactttttaaaaaattatcgcaaccaaagtaatatttatcctttggagtggaaaaaggaaacttggattaaattcatctgagtactccatgtttttgcctcagccagagttttagatgctttttaaaattaactttcattttcattaataactccaaattactgttaccccaggcacaaattatcctctgtagcaataatgaataaagctccaagatgttcggcttaatccatcagagagttcacaaaaattaaaactaggaaacatctgctttatgatcatgtcatatacaggggtggcatggggctttcagaagcatttttgtgccccagaaatgcaccctgcagatcactacttccaagagtgtcacgtgctaccgagcttgcgcttaagtggatcacttcagtgcaaacaaaggaagcagatgaaattacctcctgtttgtatgaccacttatgaggattttggagaagaggtttttgggctacatggagggtagaatggttagtctttagggttctttctactttctaaggatctgggattctatgagaagtaactcagaaaggcaatgctgcttagctttctggtgacacattaytacaaattactattactataacaaattaagggcatagtttggagacattttgaatcagtatagataaaacttctgtcccttcttaatttcataggcagattaactctatggagtgaccctctccccatagacggcagttataggcagctatgtatatagcaaaatatgacattctcagatcaagtagtcattactcatgctcttcaaagtgcaagactaggacccatttcaatcatccattacactccactgcaataattggtgggtctgtttcttacattatgacttcttcctatttggcccccagcaaatatctggcacctagtgggcctctgataagcatgtatttattgaatggatcttattttattgaaatgtatcctatttcccagaggaggagaagtagggcaggcatttcagaaaagaaacagcaagtccacattgttccagggatgccacattgtcctgggtagtgtatttgggggacatttgtaaaattgcttttgaatgtacagactacatggagcatcctgccttgcctaatcatagacttctgtgttcttttccatcagtcacttcctcttagctctaactccttttctccaacctcctctcacctaagcctctgaacatctgatctctctctctttaaagcttttatcaaaggaagttttaaagtaagcttcagggcttatatcatgcgcttaaattatgctgaccatatctctaggaatttctgtacaagctgcatgtaatcttaccttttttaaaaaagataatttattacatgtgcaagtaactgtgattcaagttctagccctttatacattttttttcttaaatcagtaagaaaaatgtcctttatccaaccctatgatccaatttttctccctgaaaatgtatggattacttaatacgtcccttgaaaagttcaatacattgatgtgaacctactgagatcttactgaattaatccatgcgaatgtgttttaaaaggtaatgctatatataaatcaaagctattcttgtgggaaatactagaagacctttggaggggcaacttgggtcccatttgggccttcagttgtcacacgccagggtccaagacgaatttcataatgtcctatggctttggttaaggaacagcccacctatcatggagaggaagcccatggtccctggggagctgagctggggtacagttccttcatcaaggataggggctccaccatcccatgctttttagcttgttgacttggccatgctgaggaagcactcagggctactgaagacaattctgctcttgcccacagtggatggtcaactctgcccagctacttaaaacttctcacttcargctatctgctctctggttttgggatattcagatgccccggtcaatctaccactggctctcctagcaacttttttcargtagccattaacccctctgatgtcttgaaaaagccgtaagtggtactaagcagagttcattcctttgtggtcagcagtactgtgcaaggagggcccaatacaggtgtccatttgttagccacaaaaattcaagataaattccaacaccactggcagactttaatagggaaaggaaaagccacatgcagccagcatcaatgagagaaaagccacatgcttccttcctcccatgcaccctcagagagacctgaagaagccagccatcctttggacatgtgggaggttgtgagggagggagatcctgtgttccagtgcagagaacttgctctctctgccatcccgccttttctagagtaggtgtgagaaagtggccttgtcaggggaaataagcagtccaatttggtgctaggccatctggtttgggatttcagctgtttgtttatagcatttgtctaggattacctgcttctcaacctctggagaattttgggccttgggttatgaaaccctccccccctttccccaccctcccccatctccaccaccaaatgggtaatacaatacctcctgcagggacaaggtggttgggcccctcccagacagcccaatctttaggcagtgagaatttaaggtcattctgggtcaatcctgcacgttgcatcacagcatggttccagaacctggagctttagtcctattaccatggttcctagttctccataaagacagttgttgaaggagaactttgattagtaattgctacacgttgggttgttgactactaattgttacactttgagttctctggggagcagactatgatgtgactaacatgccaaagatttattaggtagtgctctttgggtccacacctgttggggaagctactacagaagaaagttggacagtaggagaaattaagctgggattcagtcatctccagtgaagcctcggacattctgaagccggaatgagcatttgcagtttgacttaacaggcagggatgcacacagcgctcagtcactgtgtgctggctgtcctaggaaaaggtagtaaacttgggcaaagtggttctcttcagctagaggttccaaagggagctgttatctgaggactttctggcagccctctcagtggctgggcagcatatcagagcatctgtaataagcaaaagatgtttggaatatcttttggaaaagccattgcaatgtaacatcaaggagcttctattattctgaatcaggatatatacctgtgttttctggattactcacattcccaatagactccaaagtggatgtgattctaggtactatagaagtgatgggcactgggctagcaagcaggggacagtgttctattttggtctaccagttgtatttctgtgctttaaaaaagtaattaatactacttctgaccataatcattaaaaaatggcatgtgcatggagcttggttatgcccttcacaggcttattaatgagtcattataacaatcatattgaaggcctctctttagggatcatcagatttttacatcaaaatttatcttgtatcagccagtcatgaaatgttaatcgtgtatgtattataaattcctccttttagagcaatgctttgaagaattgtcattgtttagaatattaagttgccccagttacataaatattctataaatattagttcaaaaaatcttagtcaaaatactaattttgagagtgcttgaaagtcatatactcctgctgggctgtttgatctttaaatgtggtcaatataaagtctaaaagagccgttgtatctgttcattacaatttgtttaaattttaatcaaacaaagtaatatttatgctaccattttaatacagctcagcgttattctcagttctgctggggatttctggcagaatgagacgtcttgttcttgagctttgtgacatgtccaaaatcaatttttggaattattttttataaatcactgcagcccagtgattacaatcaatgtactgtgtttatcaatgttcagccaacccagatacttcaagagctaccttcctcaagtgtttcacttaggaagagttacagtcttgtgtcctgtaggctatttaaaaatatttgattccttgaaggacccagatatttgttacggatttagagaagtgtatttttcactttctggaagagatccagaaagckatctattttttgtttttttctcattttcatgctcatgtcattatggtctagccattctgaacacttkgtgcgttccttaactctttattcaaggtttattgtgtgaccttttttttttctgttaaagatgttttttatgacatttatatcaactttgattcaacttcttccaacagttttgagccactttagtagaaaaggaggtccgttgcttttccaactcttttctttttttgaccctaaatgatgactttctaacttttagtccaggtaggatggaacatggagcaatgctcagaggcttagccaactgcaaatcacctatctccctagtgtcctttatttatttaattatttttttgtgttacgagaattacgtttttttcctttcaacttttattttaggctcatggggtacatgtgcagttctgttacgtgggtaaactgtacgttgctgaggtttggtgtacagattatttcattacccaggtagtgagcataatactcaataggtagttttttgttcctcgccctccttctaccctccaactttaagtaggtcctggtgtctattrttcccttctttgtgtctatgtgtactcagtgtttagctcctacttataagtgagaatgtgaggtatttgattttttgttcctacgttagtttgcttaaaattatggcctccatttgcatccatgttgctgcaaaggacaggatttcattctttttttacagctgcatactattccatagtgtatatttatcacattttcttcacccagtccactgttgatgagcatctaggttgattccatgtctttgctattgtgatagggctgtgatgaacatatgcatgcatgtgcctttgtggtagaatgatttatattcttttgggtatttacccagtaatgagattgctgggttgaatggtaattctgtttttagctctttggcatctcttttttaatactcctcaaaccttggtttattctctctggcttccttcccacagcctgcccccttttccaaaacatgatatgttcacttctctttggcaaatccaaagtgccatattcactcaaaagattagaacgatgaaaagtctgtcacatcaatgggcaatggtagttcatgagtatcaatgattgatcatattgtgattagtaattttgacagtcagattgggcagatgcatttcaagttagcaatattaatatattcacaccaattctgcagtccatacrtcagatatgcagacatcctgactcgtggtgtattcatccaacataaaatatgggtcagctagtcttctaaacaggagtacagcagggaaaaaagccaacctggcttccaggtgcttacagtcagtctagggccttacttctccaggtgtagtccacaaaccagcactaccagcagaactgagagctggttagaaatgcagattttcaggccctgccccagacatactgaatcagagctgtatttcaacaagtccttcgggtgatttgcatgcatattaaagtttgagaagccctgccctaacacatggtattatagtagaacgtgatggatatcaactttaagcaccgcagatgccmctggagggttagttacaacccacagtgctgaccccactcccagagtttctgattccatagatctagagcagagcccaagaatttacacttcacacacacttccaggagatgctgctgctgctggtacaaaccacactttggtgtgggtgagagtagagcccactgtctgggcttcagtcttggctatgcccctcaaagacctcaggcaaatcattcactttctgggtctcggtttcctcatttgtgaaatgtggtgtcagtaccctcctcagaggtttatggtgaaaatcaaatagtacatgcaacatgcctggtagacagccagtggctactcaatgttagagtgttgttgaaagaatgaagagggcagcccttgtctgtgggcccatgtggctctagtgcactcatttaaatgaaatcactctcaattgccccagcgctgtaatttggatctctgaaaattagaccttaccagcctgttcactggccctaaacaagagagttccttatttctgctcactataggtaatgacttagggcgagattggtgtcacctgcccacgcagtgacactggaggcactttttctttctgttcatgtggtgtgatcattttaattatcacctgacaattgagggatgaatcctttcccaatgcctttgcagtgtggtgattaatgaggctgaaatgcacctctttcatcctgtaggactctcttcagcagtaacatttatagcatcttttattaatttttacagttttcatgtattaaagaatgttagatagaacagatggaaggagaaggatatttgcattttgtcaagaagttttttaattcatgttttctaaacactctggtgatgcttgaaggacacttttcctctaggcaaactatgttttacctcctcaggtcacaaagctgtaattttgaatttgcaagagtgcattatgttatgatatgaatattagaggaataaatatctcctccaatgctctaccttattaagtatcaattaaactcaggaagataattagggctaatgacactctggtgattctgatggcaggctcagtatggcccattttaaatagtgccatttaaatgagtttatctttggtgtacttttgataaatggtgttttcagactcccatgcattataaacctcaccagccctctgattcatccatttaggaagcagtcactaagctgttacttccagccagtcacaaagataaacagatgcagttcctcttctcaggaaggtcatagttcaaagcagaggtggacttacaaagaaatgatttctttaaaatatttggaaaaagagacatgtaccaagctaataaaatcccagaggaggaatccaatctagccatgtggagttaggaatggcatcctgggcaaggccaggcctcagctgatacttagcaggtaagcgtggaatagtaagtgaagatgcaagaagtgcttacagacagtggagagaatacagacaaagacagagacacagctcagtaggaragagaaacagaattaatttaatttttttggaatgcacaggcaccaggcaaggagcttgtttgcccctgcaccatgctaaggagtttgttctcttcctgcagacttagagagccactggacatatggaagcaagatggcaacacagatttatatttcacatgggattaatttggtggctatgagcagggaggggttagaggcaggagaaccaattaaaagtcaactgcaataatttacataagaaatgataagcatctgaactaggagtgataaaagggattcaataaccacataggaagaaagataaggcaatggttgagggttggctgcgtgggaagtggtggaggaggagttaaggatgaaggtcagatgtgaagctaaggtgaagggtgaatggtgatgccgactggtgatatcgtgcagacaggaacgggcaggtgtgggaggtattgagcattttttaggggttagatatgctgaatttaagatactgtggatatcttcatcatttaccttaaatctgagctgaaggaagagaaagaggtttaggatggatccatagatttggtggtacttgaaatcagaggaaagaaaagaccattcagaaaaaacctagggagggagaagcagtgactgagaaaagaacccaagtgaagagcaatacatcatgaacaagttagatgagaagctggagaatggggagatcgggacaatggggagatcgggacaggaagctgtgagaagaatcaggacagaaactaaggaactggggctttggaaagaaaccatggcagtgcagtggtgggggtgtcatctagagagctctgggttgaagtggggtagagaaaggaagataactctgctaagaaatgtgtccacaaaccacaggtggtgggggcatagaggaaaccggaggaaagggagcaggagcatggtggtggaagaagtattccatcatactttccgttgggcaagattttcacgagaagaatatattaagggtcttcaaatagctgggggagattgatcttgacaaaggactggcctctgtgaattgtttagttccacattaatatttctcagtgcaccaaagaagagatctctgcctctcattattataaaatgaagtgtgatatggctgtccagggactctgttctgaatacactatgtaatatattagcagaaatagagactattacaagtttctagtcctgtcagtgttctaggggagctagcatcagagttaaagcagcatttggcattcttgaagggactctgttggaaagaaactctgtggagaaccttgccctgcacagcccacactctctggtgattaaactacaggtgttaaaaataatgcccttgcaaaagaattagtgaaaaaaaagaggagaggagggcatttacataacaggacaattctctgtatcttccaggctgagctagaccagagttgaagttgaaacaatgtcatgaaaactatcacttttttctgtccatctctcagtctcacttttctctgtactgactttattttcagtcaggattttttcataatgtaacagtgaagactgaaagtttcaggtatacgtgacctctagtgtctgcgtcgtctgtgttcttggcaggagtgaggggattgaggggtgctctggctaaatgagatcttgagcccacccaaggttctacacctgaaccatagagactaaaatgttggggggtagtccccaaaagatgccaggcaatgacaagcatttccaattagaaacttaaggaggtagacatttgagggacttttttgttgcattttttaacttactgtccaatacatcacccggaaattggaaagttggttattgtttctgttaggcaactaattccatggataggcttgggaaaattgcttgacacctggagacctgagattctttatgagcaagaactgaggggattggactgcagcagtggttctcatactttataactcccagaatcactggagaacttgttaaaaccttgattctagaatcctaactttggagtgtctgattcagtagtttggggtgtgagggtaagaatttgcattttcaacaaattcccagatgatgctgtaggtggctgaaggaccacgcttgataaaccccggacttcataaatctttacaacccttctcatcttctaatgctatgaatctgtaatttyacctatacagaaatagccttagagcctaggtcaggatgggaaataggtttgctctcacatatcaaatttaaacaattagaatgcagtattgagaagaattctgatgcaaatgccatgctcagctgaaaaagagtactatgactgattcatgattttccttcagtgtggatggtacccaggcaatcctgccacatattggccctctctgatgtgggaatttctagctcaggaggcagtctagtgttcatgatataagtctagtgttcatgatataagtctagtgttcatgatattagaaataagcaaaataaccatagggaatgacaactatctcaagctcattttttctagtctacggtaaatacaaggatgctgctgatgatggtaatgatgatcatgatgatgatagcagtgatggtaacctattagtctggcacttaaaatactttcacaaacattatcttatttgatcctccctacacccctttcattaagtggagcaggagagcaacaaaccatcacttcaaaataagaatatgaaaaagattgattgaaacaatcaaacatcaatttccaataaaattttaattgcctttgaggccaactaaagaccttggactttttgttgtgttccaccatgggagaaagtgtactttgtttgaataaataagtggtaacatatagtccaaattcaccaaagaagaacatttgttgctaagaaactagtaagactgggcgtggtggctcatgcctataatcctagcactttgggaggccgaagtgggcagatcacctgaggtcaggagttcaagaccagcctggccaacatggtgaaactccrtctctactaaaatacaaaaattagccggtcatgatggagggtgctcgtaatcccagctactctggaggctgaaatgggagaattgcttgaacccgggagatggtggttgcagtgagccaagatcatgccactgcactccaggctgggtggctgagcaagactccatctcaaaaacaaaaacaaaaacaaaaaaacccaagaattgttagccctttatagcccaaagacaaaattccactgtacagttcctttttttttttttttttttttwaatttcaataggtttttggggaacaagtggtgtttggctacatgaataagttctttagtggtgatttctgagattttggtgcacccatcacccgagcagtgtacactgtacccaatgggtagtcttttatcacacaaccccctcctaaacttccctctgagtccccaaagttcaccatgtcattctcatgcctttgcatcctgatagcttagctcacatttatgagtgagagcatacgatgtttggctttccattcctgagttagttcacttagaataatggtctttaattccatccaggttgctgctaatgccattagtttgttcctttctgtggttgagtattccatggtatacatatatcacattttctttatccacttgttgattgaaggacatttgggctgattccatatttttgcaattgcaaattgtgctgctataaacatgaatgtgtaagtatcttttctgtataacgacttcttttcctgtgggtagataccgaggagggggattgctggatttttatatttcaaaggacttaatttttgtgtaaaaactcttttgacgagtaaggtacattgagagaactacccaaatcataagtgtgtagctcagtgacttttcagcaagtaaaagcatctagtaaaccaaatgcagatcaagaaaaaatagtaactgtgacccagagatactatgtaccagtgattgaccccaatggtagtcactatcttgactttcaaaaccatagatcagctttgctgcagtacagtttatacaaaaagaagtgactgaccacttatgtcatggtgttcctatctgaatcaatcatttttttttggttgattcagacaggaacaccatgacataagtggtcagtatgacaacaccttgatatcatatctgtttgtaatatttttataaaagatctgaaacgattaatgtctatatttagaatttattaaataaattattcttgaaaattttgagcctaaaaaatgcagtagcacattgtctttgtggaacttaattatacagcagttgtatctcctaaaatataggatatgcagcatcaaataagtgtcataaaatggatgcattaagcctgcgcacttcattctttttttgttatatcttttttattatttattttttaacttgacacatagtaattataaatatttatggggtacatagtgatgtctcaatccgtacaatgtatagagatgagatcaggctaattagcatatcagtatctcaaacatttgtcatttctttgtgttgggaacattcaatatcctctcttctagctatttgaaaatatatattattgttagctatagtgatcttaacagtgctatagaacactagaacttattccccctatctggcaataaattttgtacccttgaacaaatttctcccattcccctgcttcccccaaccctccctagcctctaatatcctctgttctactttttccttctatgagatcaacgtttttaagatcaacattttaagcttctgcatatgagtgagaacatgcggtgttttattttctgtgcctggcacttaacataatgtacacactttattcttaagaaaacccctcaaacttcccttagagactgtttattctaattttacacataattcttgctgatttggtcatgtagtttccaacctcaccacatactagaagtctcaatgaagaatttgggttgagaggctaacccacattagcatatagacaatatcaagaaataacagggccaagtgcagtggctcacacctgtaatcccagccctttgggaggccgaggcgggtgggtcacaaggtcaggagatggagaccatcctggctaacacggtgaaacctagtctcttctaaaaatacaaaaaaaattagccagatgtggtggcacatgcctgtagtcccagctactcggcaggctgaggcaggaggctcttgcttgaacctggaaggtggaggttgcagtgagccaagactgcacccctgcactccagcctgggcgactccatctcaaaaaaggaaaaaaaaaaagacaaataacagctgacagccagggaagaaacacgaataacataaaattttgcaactgaagctagaaagcactatgactgaggccatttagagtcacgtatcttagtagctctgagagcactggcatatcatagaatcagatatgacatgcacagccatgatcttgagctatctggaagagtctcagtcatattcaacaagcattactgaagccagcacggaagtgcataaaatattagagagatgttcatctaaagtagctataatatggtataaaaatgtacagcttaagagataaacctttggtcatttgtatatcttggaagctccagaaattattaatactaattttttgagggtttacgagagtaaaaaagtcattttataataaaaatagtttccatatgaccaagaaagagccctttgaaggtttgccttttagatttcccaaaatggaagaataatacatgttgtaaatgcctggaggttgaaatccataatattgtctaaactcaacttcagcttgaaaagtcctattcttgggagttccttacacatgctcactgtaaaaagattttttcctttaaatactgctaattctgataaataaaaatgagaaagtgcaaattatacccaattctactcagaaataaacattttaaacctgggcatctgctcttttcactttacagtaaacagctttctagcccttttaatattttacttcattgtttacaacgactacatcattgtttagttatatgatcatgtattaaccaattcccaactgttgaatgtttagattgttcccagtgctttcagtattgtgtgaaatgatgacatgaagaattctttagctaaatttttggccacaggagttaactccttaggataaacttctggaggtgaagagcatcttgaaaatgctctgcagaagggctttttaatattcaccagcaatgtatgagaaagtctgtttcctgaacccaaaccaacactgggtaccaaacacaagtttttgttacttgtagcctctccacaatgcctacactgcatagcatctttttgtttcagtttgctttgattactagtgaggtgggacaatttgccatacgtctattaaatgtttgtattctcttttctgtgtattgcctgttaatgtactttagccatttttgattggggttttaaaactcttgttttattacaaatttgtaagatatttttgttactcaaggaaattaacattttatctcatcacaaatatttttcataacttaaatttacaagtgtttatttttgctgttctttttaaaagcagttaaaaaagcttatataatcaagtctgttaaactgcctttgctatagcaagtctttatcccaaatgttatataaaactcactagtgttttcttctagacttagattttttttttttttgtattttaacattttagtctatctggaatttatatttgaagagatgtgaggaagaaatctaagttaactatttctctatgtattttgatttgtcctaatactggttattggataacacatcctgaaatgcattttagaagatggataaaatcaatgctgaggacctattcagaaggacagtgatgccagagctagttattcattgaactcattctgtgagaaatgtcagccaatcttwggtaagtatgagtaatgcgaatttgcagaggatggaaagatgagacttacttcaattcagcaactatttattcaacttaccatgtgccagaattgttagcagtataggtggaggaaccagctggtcatactcccaggatgggatgaagattaacttgatgtttctttgggaccacctggaagaaaaggaaaaatgaggtgggtaagccagacacaggggtagttgttgcagggctcaaaagctggactgaagagtttggaaaatacctttactactgagaattctaaagtacatagtcataaaaatgatttttttctgccttaataatagactggattttagtaatttaaagatgtttaatggataatattaacaatgtgaaataaccaagaagattaagctaatgccagctcaactgaaatgtcatttgttgagaggagtaatccttaatgccctaatctgtagactcattaaggatttggaagaaattatgaatgacttttttcactaactgaatgaggatttaattaagatattcctttaataaaaagagtatagggcagcattaaagtagatttcaagactttggaaggggaaagtttgttctaaaagagaatctatagagaagacccagttttatagctcagaagctataaaagaaatgacatcttgatagagctaaaacatgaaatatcctgcaattcttttctcaggtcagagcatgttatcattaagtactttggtacaaagttcaatttcttgattgttcttgtggttttgttctataatgcttgcatttctttaagtttatataataactccattagcccaagtataatacatacatagggaaaataatcaactttgagcgtaaatctaatattcagtatttgagagctgtcctagcctgggcaagatggcgagactccatctttacacaaaaaattttaaaaattagttgggcatggtggtgcaggtctatagtcccagctactcaggagactgaagcaggaggatctcttgagacaaggagttggaggctgcagtgagctatgattgcaccactgcactccagcctgggcgagaaagtgagaccccatctcaggaaaaaaaaaaatttctaaattggcctactcaactcatctaagtttgttgattggtgctgactaatggtgccctcttccctgctccagttatctgattttctctgattacaaatcaactataaattataaaattatgaagtcccatttctgcattcccactggtacctcagcctgtagtattgccaatcaccctacccttttacctcttaaaatcttatccctcacttatgattagaatgatagcctggcacggtggctcacacctgtaatcccagcactttgggtggccgaggcaggtggatcacttgagggcaggagttctggaccagccttgccaacatggtgaaacaccatctcctctaaaaatacaagaaaactagctgggcttggtgccacacggctgtaatcccagctactcaggagcctgaggcaggagaattgcttgaacctgagagccgagattgcaccactgcactccagcctgggtgacagagcaagactctgtctcaaaaaaaacatatattttaaatcattgtttaattctttttcttttctttttattttttgagaaagagttttgctcttgttgcccaggctggagtgcaattgtgctatctcggctcactgcaacctccgcctcctgggttcaagcgattctcctgcctcagcctcctgagtagctgggattacaggcaggtgccaccacgcccagctaattttgtatatttagtggagacgggtttctccatgttggtcaggctgatctccaactcctggcctcaggtgatctgcccacctcggcctcccaaagtgctgggattacaggcatgagccaccacacccggctgaattctattgttgaaactttcgagtgtattttgtatttctctaagtatgtctttcatttctagaagttgtgattgtcttttctttattatatatatttcttcgaagattttttcattcatatcctgtatttaaaaaaaaaatctctttaagtcggttttcacctttctctggtaccttcttgagtagcttaataatcaaccttctgaattctttatctggcgattaagagatttcttcttggtttgtaaacactgctggagagctagtgtggtcttttggtagtgttattgaaccttgttgtgtaatattaccagaattacttttctggttccttctcatttgggtagactgtttcagtggaaagatctggaactcaagggctgctgtccatattctttttttcccatggggtgatcccttgatattgtgccctttcatttcccctagggatggggcttcctgagagccagactgcaatcaatgttatttcccttctgggtctagccaccctttggggctactaggctcctgactggtgctggagaatgtctgcaaagagtcctgtgatgtgatccattttcaggactcccagccatgaataccagcacctgctccagtggaggtggcaggggagtgaagtggactctgtgggagtccttggttatagttttgtttagtgcactggttttctcaaatgatggttatgctagcagggaagttgtcacctgctcagaacctctggttagccaggatgttgcaggcaatggaattgcctgcaatgcaatttctgcattcccactggtacctcagcctgtagtattgccaatcaccctacccttttacctcttaaaatcttatccctcacttatgattagaatgatagcctggcacggtggctcacgcctctaatcccagcactttgggtggccgaggcaggtggatcacttgagggcaggagttctagaccagccttgccaacatggtgaaacactatctcctctaaaaatacaatgcaatggaatgcaggcggttgttttctccctccttgcagcaggattgttctgttatcagttgcttgagttggttggcccaggaggtggcactttcaagagagcaccagttgtggtagtagaagggggatgtaagcttgccttatgttggccaggataagtattcaggttccttaggtgatgggctgggccatagagctcctgagtttatgtcttttgtcttcagctagaagagcatgtagagaaaaaccatcaggtcggggcagggttaggtgggtctgaactcagactctcctggggtggggcttgctgcagccactgtgggggattggcgggggttctcaggttatcagagttatattccagggaaaattatggctgcctctactgtgtcatacaggtcatcagggaagttggggaaagccagcggtgacaggcctcacccagctcccatgcagccagcgaggtcagtttcactccttccatacctcgccagcagcactgagtttatgtccaagcagccagcatgcagggctctctttttagtttttttgaggaactgtcatactcttttccataatggctgtaccaatttacattcccaccaacaatgtacaagtgtttccttttctccacatcctcaccaacacttatcattcatcattttgataatagacattctaacaggtatgaggtaatatctcattgtggttttaatttgcattttcctaatgaatagagatgttgagcattttgtcatatatctgttggccattcatatctcttcttttgagaaatgtctgtccaaatcctttgccccattttttaccaattgttttcttgctatggcgttgcttgagttccttatatattttagatacaggcctcttatcagaaatttggtatatagacacaaatggaatactatgcagccttcaaaaagaaggaaatgtcattcatgacaacatggatggaactgaaggacattatctaaaggaaataagccagggacagaaagacaaatatcatatgaagtcacatgtggaaactcaaaaaggcaatttcatagatgcagaaactagaaaggtggttaccagaggctgggggagagggggaggaatggagaaaggggaaaggttgaccaaagggtacaaagtttcagctagactggaggaataagttttagtgatctcttgcactgcatggtgaacacagttaataataatgtatcgtatatttcaaaattgctaataggcttttaacattctcaccacacacacacaaaaatgataaatcattgaggtgatggatatgttaattagcttgattgaatcattctataatttacacatagatcaaaaataacatattaccccataaatatacacaattattgtcaattcataacaaatgaataaaaaataaatattaaaagattgctgggcccacacatggagtttctgattctgtagtgttggggtggggtctaagagtctgcatttttatcagattcccatgtgatgatgctaatgtggttgggccagggactactcttttacactcactgttttagagcaccttcttatacaaattctcaatgaagaatcaaagtgttttgttcaacattacaaagctagttagtgacacaactagaaacgtcatcataaacttcaggagtgggttttcaaggtaagatattttgactctcaacctgtgctttaagactattttctccttaaataaaaattgattttgaagtaatatatatattttcccacacttgtcagttatttctaaggtattgataggttccaccattcacccacttatcccaaatggaaactcggactgaattcatgaatttattctttttatgtacataattggtgatcttccttaatattttaaaacgttccatccttttcactttatccctagagccactgctttgatttgggacttcattagttgtttgccagaggacaaaacagttttcctaacttttctttctgccttgtctaggtttgctttaattcattcacaagttttcatattcctctttctaaaaatcaaatctgtcttttaatatacaccatttccttttactgtaatttgaatacatattttaaattgtaagtttaaaaaataaaaagtaataaaaaattgttacagcatttttcaaaattccaaaaactatgaagaaaaaaataaaaatcaaccataattcctcagcacagagagaaccatagttcatcttttggtgtatttttccttttatctttctgttggtcacaaagttatatttttaaaatttaatttactttgtattaaacagcttgagatataattcatatgccatgtaagacactgatgtaaagtgcacagttagtgctttttggtatattcaccgttgtgtaaccatcatcacaatttaatttagaacattttcattacccccaaaaacacttcataaccactaacaatcattctccgtttattactctctgcttttacagagatacaggcaaccactagtctactttctgtttctacagatttactgattctggacatttcgcataaatggaatcatacaatatgcggtcctttgtaactggcttctttctctcagcataatgttttcaaggtgattccaggtatagcatgtgccacaacatcattccttttcattgccaaatatttcattgcatatctataccaaacttttttattcatttgtcagttaatggctattttggttgtttccactgcaggctatcatgaataatcctgctatgtacatccctgtacatatttttgtatagacatttgttttcattttgcttggttatatatctaggaataaaattgctggatcatatgataactctatatttaacattttgagaaactgtcaaaccattttccaaagtgactgtgccattttatatttccaccaacaatgtgtgagagctccaatttctctacatctttgccagccctggttattgtccatttttgttcttgtttttttaaattacagccatatttgttgatatgaaacagtatctcattgtggttttgctttgcactttcctaatgactaatgatattgaagatgttttcatgtgcttcttggccattttaatatcttttttggagaatcatttgttcaaatcttgtgccaacttttaatttttttaattttggagttataagagaaacatgtctgcatataattccctggtaagatcaaatattttctctcattctgtaggttgtctttttactttattaacagaatctcttaaggcataaaggtttcaattttcatgaagttcaatttatgtattttgttgttgctagtgcttattggtgtcatatccaagaaaccattgcctaccccaaagtcaagatgattgacgcctatgttttttctaagagttttacatttagatctataatctattttgagatgacttttgtgtatggtgtaaagtagggctccaactttattcttttgcaggaagatatccacttctcccatcatcattttttgaagactattcatttctcattgaatagtattgtttcctttgttggaaatcaattgaccataaatgtaagggtttatttctggtccctcaattttatcccatcagtctatatgtctgttgtgtgttaatacaacactgtcttgattattatagctttgcaataagtttcaaatcagaaaatgttagtcacccagctttatttttatatttcaagattgtttgggttatccagccccttgcattttcatatgaatttaaggattagcttgtcaatttttgcacaaaaaaggagcttggatttggatagagactgcattgactctctagacctacttggggagtactgccatcttaatattaagtctttccatttatttagatctttaatttcatttaataatgttttatactgtttgttttataagctttacttttttttttttttttttgagacagagtcttgctttgtcacccagggtggaatgtagtggtgtgatcatggctcactgcagccttgacttcccaggttccagcaagccttccacctcagcctcccaagtagctgtaaccacaggtatgcaccacaatgcctggtaaatttttgtgtttttggtagagaccgggtttcaccacattgctcaggctggtcagtaactcctgaactcatgtgatccacctgcctcggcctcccaaagtgctgggattgcagacgtgagccaccatgcccagcctaagtcttgcatttcttttgttaaatttatttgtaggtattttattgtttttgattttttattttcaacttttatttttagttcaggggtacatgtgcaggatgtatagacttgttacatagataaacgtgtgccatggtggtttgctgcacagatcatctcatcacctgggtattaaacccagcatctattaactattcttccagatgctctccctcctcccctaactaaccctccgacaggccccagtatgttgttccccacttgtattcacatgttctcattattcagctcccacctaaaaatgagaacatgtggtatatggttttctgttcttgtgttagtttgctgaggataatggcttccagctccatccatgtccctgcaaaggacatgatcttattcctttttatggctgcataatattccatggtgcatatgtactacattttctttatccagtctatcattgatgggcatttaggttgattccgtgtctttgctattgggaatagtgctgcagtgaacatacacgtgaatgtatctttataatacaatgatttacattcctttgggtatatacccagtaaaagaattactggatcaaatggtgcttctgcctctagatctttgaggaatctctaaagtctcttccacaatggttgaactaatttacactcccactaacagtgtaaaagtgttcctttttctccacaacctcgccagcttctgtcgtttcttgactttttaataatagccattctggtatctcattgtggatttgatttgcacttctctaatgatcagtgatgttaagctgtttttcatgtgtttgttggccacatgtatgtcttcttttgagaagacatgtcttctctgtgcatgtcctttgctgactttttaatggggttgttttcttttttcttgtaaatttgtgtaagttccttgtaaatgctggacctttgtcagatggatagattacaaaaattttatcccattctgcaggttgtctgtttactctgatgataatttcttttgctgtgcagaagctttttaattagatcccatttgtcaatttttgcttttgttgcaattgcatctggcattttcatcatgaaatctttgcctgtgcctatgtcctgaatggtattgcctatattttcttctagggtttttatagttttgggttttacatttaagtcttcagtgcatcttgagttgatttttgtatatggtgtaaggaatgggttcaatttccattttctgcatatggctagccagttctcccagcaccatttattaaatagggaatcctttccccattgcttgtctttgtcaagtttgtcaaagatcagatggttgtaggtgtgcagtcatatttctgggatgtctattatgttccattgctctatgtgtctgttcttgtgccattacaatgttgttttagttactgcagccttgcagtatagtttgaagttgggtggcatgatgcctccagctttgctctttttgcttaggattgtcttggctatttgggcattttttgcttccatatgaattttaaaataattttttctaattctgtgaagaatgtcaatggtagtttcatgggtatagtattgaatctataaattgctttgggcagtgtggccattttcacaatattgattctttctatccatgagcatggaatgtttttccatctgtttgagtaaactcagatttctttgagcagtgatttgtacctgtccttgaagaggtccttcacttcccttgttagctgtattcttcgcatttcattctttttgtggcaattgtgaattgagttcattcatgatgtggctctcaacttgcctgttgttggtgtataggaatgttagtgatttctgcacactgattttgtatcctgagattttggtgaagttgcttatcagcttaagaagcttctgggatgagatgatggcattttctagatataagattatgtcatcttcaaacaaagatagtttggcttcttctcttcctgtttgaatatgctttatttctttctcttgcctgattgccctgccctgaactttcaattcaatgttgacgaggagtgatgagagagtgcatccttgtcttgtgccaactttcaaggggtatgcttccagcttttgcccattcagtatgctactggctgtggctttttcatatatggctcttattattttgagggatgtttcttcaatacctagtttattgagagttgttaacatgaaacgatgttgaattttatcgaaggccttttctgtgtcgattgagataatcacatggtttttgtctttagttctgtttatgtgatgaatcacatttattgatttgcatatgttgaactaaccttccatccagggatgaagcctacttgattgtggtagataagctttttgatgggctgtgggattcagtttgccagtattttgttgaggatttttgcaatgatatttatcaaggatattggcctgaagttttcttttttgttttctctctgccagttttggtatctttttgatattttagataaaattaatttgttaattttatttttggattcttcattgctagtgtattgaaatacacttgatttttgtatactaatattttatcctgaaactttgctgaattgacttattagtactaatcatttttaaaattggattcctgaggattttatacatactagattgtgtcaactgaaaacaaataattttactttttctttcccaatctggatacattttacttatttattttttcttgcttaaatgccctggagagaacaatgttgaacagaggtagtgagaatagacattcttgtctttctcctgattttatgtgaaaagccttcagtctttcataattaagtgtgaggttagttgtggggttttcatagatgtcttgtatcgttttgaagaagtttccttctatcccacatttgttcagttaatcaccaccaccttattttaaaatctttaaatagggaaatgaaggacttcttcaaggtgaactacaaaccactgctcaaagaaatcagaggcggcacaaacaaatggaaaaatgttccatgctcatggataggaagaataaatattgtgaagatggccatactgcccaaggcaatttatagattcaatactattcccatgaaactaccattgacattcttcacagttttagaaaaaaactattttaaaattcatatggaaccaaaaaagaactcaaatagccaaccacgacaatcctaagtaaaaagaacaaagctggaagctccttctgttttatctctactcttcacctcctaattgtacttcaaggcacagctcaagtgctggtaatttcaaaaaatatgtaaatgcactagatctggcttaagctcccctcttatgtattctcataacataatgcacatattttcatgctagaattaaacttactgctctgcattgttgatttaagtttctgcctcttcaagtagagtaaatttcttataggcaagggcctataagaaatcttaggtatcttttattcacaaggcctggaacccactcggtaaattgatggacagacagatgkatgaatgttgagatttatgccatgttttaattaagcatacataaattaataaaaatactgacacaattctaaaattcttagcagccataaaaagcaagagaccctaagggcaaatggagttgttctagggcctctggaatgtaaatttggggaaaaatgattggcaaattaaaaggcatgtcaagcaaaaaaaaagatgtgggaagctagagttctcacagaacttgtttgtctctattcctggaaataatgctctatgacatatcttcctagggatccttatactcctcacccacaatccccaataccagttattatatattctattcaactcagaaaatatggcaggacatatgttaagtaatcagccaggttcacatacaaaacaagtgagagctgtggcccgagatcacaataaaccaagtttcaccaaccggttaacgtacacacacgattcaatgagatattaaaaacagataattaaatactaaaatgaacagtatagacagtagttcagtggatggagtgactcgtttgttaacaattattgtgtgctaacaatattctaggtactgggctagatggtgagtatataatgttgaatgattcagaatccatgtgctcaaggaatttgtagtctactaagggagtggtgcaacttaatctataacttattatttattcagcaaattcttgttgaaaactatcacagaatctatcctagcagwgctgtgaayatagctatgaataaaaaagaccaaaatgtctgcccagataaaggatacattgtgcatacatacactggggagaggcagacaaaaaaacaatgtagtttgagtgtgtgtgcgtgcttgcatgcgtgcatgcaggcatgtgcatatataatgctaaaacatgataagtactattaaaaaaacaggttagggtgattgaaactactagggtatgaataagagtgggttgcaatttaaagtagggtcattgtggttggccttattgaggtgacattggagtcaagacttggaagaagaaaggttgttggccacacagctatwgagggaaaaatgttccagatagaagaaacagtcagggcaatgccttgggatggaatcatgcatagagtattcacagaatagcaaggaagctctagttctaaagtaaagtgactgggaatagcggtatgggatgggtcagagagtgggaggccctgtcagccttgggaagaattcagttttagtaaagtggaaacagttggagggctctgggctgaaggatgatgcaatccaatttgtgttttaaacagattactctggctgcttgtgaagaatagacataggtacaagaggagatgcagggaaaccagttaggaaaccattgcaataagctagttttgagattattttagtggctgagattgggatggaaacagtgaaagtggtgggaagacaacaaattccggatatatttaaaaattgagccactggaattggatgtgtgatatttaaaaatgagaggagctgaagatgcattcagaattttagtgaggctactacttaggagactggaaaaggatggggacaagagtgaagacttcaggtaaaaatgactggggatggacccagggagatcaggagttcagttttgcacattgtaaacattaaatattccaagtggaagacttcagcagttggatttgtatgtactaaaacagagcttggcacaggattccacgaaaacatgtagaaaggatatctacttaatgcttcccaaggaaatgggaaatgctgcttcgagaaagcagaagagttggctgtgtgatcaagaaggcttcaggaaatgaagtgggcattgaacagtaggagctatttggctacagatggtgttgtgagagaattccagacataatgaataatcgaagcaagacccatagaatgggaataagcagagtgagtttgtgagtgtgagcagaaccctgcctggagtgaggattcttatggagctgctggcggataaatatggatgggtgacttagggccatattttgggggaccttgaaggtcaggctcctctggaaaagcatcccttgccaattggtcagcttggagcttctttccaagccctctgcagccagagttgacatttctatctcaacactgtccagagtattctgtgagtctattcatttacttttctctcagcctcctgggattgtatgtttcttgagggcaaagaccttatatttttatttttatctatcccaaagattcattagtgaaagctgaataaatgtttattcaaagaataagttatatttgatacacacacctcttgatcatattttcatttcaatacccatgggaactttttttcaaaagtaaaatctttgtctataatgaataggtgaaagatccagtacaattatttcacattgtaagagctaacattgctggaaagattgtaggaaacagtttttcaaaacagtgactaccaagtgacaagacgcaaagccccttaaagctgctaaggaggaaacattggaactcgaaggtagataaaagaccaggtttttaggaataaattaaagagagggaaatggctggtggatttgcagggagggaatttgtccaggccagttgcatattgtttgaggatggaagagtgaaatctcttactgcaccttaggtataagaacttcaggaatttggtactcatcccttcagagacctgtcagcaaaatgctgggctcagcattcccacaagggccccaagatgaacaccatggtttacagaggaggagattctatgtcaagctcgatccccagatctagcaaagaggatgggagggactgagtagctgacagcaaccagttaacactgactgagagctggccaccagaaccaactgtggctccactcaatgtgggctcaggggaaacagctgctgcttgagtcaccaacaatgcactgctgagtatgtttgaatgttatgcagaactctctggggggtagtgaatatatgcaccaattcatttaaaataattctattaggcactatcctagtcttgtctctagtcctaactgctctgattgatagagtcgtatgtccattagctcatttaaaaactccattacttgtttttcttaaagtaactgggtcagtttgttcattggagaaaacatctgccacaaacccaagtctgattatccttagtttgccctttagtcattctttcacattgaaatggtgtttaagtgtaaaaagcagctagttcagctcccaattcaagccattacacaagggcatttctgcaagacaacaatcatacttagtgtacaggagaagtgcttcatgtgtacttcccatttcttcgacagaatattaaaaatatgtgtattctggccaggtgcagcagctcacacctgtaatctcagcactttgagaggccaaggcaggaggatcacttgagctcagaagtttgagacctgcctaagtaacataacagggcccctctacaaaacataataaataaagatgggtagtcaagggccaaaatttaataatgttactgtgttttactaatttatcaatacactgataagtggaactgactttttttttttttttttttgctcctggggcaaggcactgtggaagatgagatctagcatagtcaggtgccactgtcttaatttatattgcaccactggtgcaaatgaccacacagtgaaaatggcagataactcaatatcattatgaagatagttttgaccctgtggcacctctaaagtggtctcatggatccctgcagatggcagaccacaatttaagaatgactgctatatagaaatttctttgcatatactaatttttgtgtacttcaaattcttgagtcaaagtctataaaaatactttaaggtgcctgacatgtattaacaaattgccttgcaagtaaggtccacctaaataattcacacttccctctgaaacgtatgagagtccattttatcagccaaacactctacagcattaaagctcctaactatgtcctgtttgtaagtaagatggaggccaaattgtaactcattgctcaattgtgtctgagctaaaagcagtaatttctcttcaatttccattacttctcccagtttagatatttcaaccattcaatacattcctcacgtaaactccaaaccattctacaaaacaatacctgtcagaacagatcagtgaatttagagaagaaaagaaatagtgataaaaataagttcatgacccattactttacctcctctgtacttcaagaaagctcttctttttaaactaattcactacataggctagcaataagttgcgttccagctcctttaatctaaaaagtgatttttaagccataatcattatcataaaattccaaggcaaaaatatttaatgtataatcataggaatggaaggaagaaaatgtaagctagtttctgattaattcacatgattccaggaggtttgacatagatttgttttttttgtggggggggggatggagtcttgctctgtcacccaggctggtgtgcagtggcacagtctcggctcactgcaacctcctcctcccaggttcaagcaattctcctgcctcagcctcccgagtagctgggactacaggtgcacgccacctctcccggctaattttttgtatttttagtagagatggggtttcactgtgttgcccaggctggtctcaaactcctgcgctcaggcaatccacccacctcaacctcccaaagtgctgggattacaggtgcgagctgccgcgccaggccgacataaaattctttctaggtaaaattgtctaatcaaaaattctctgaaggacaagattcagtagttttaaggattttactaggtatattgaacttcattataattagtgatcattttaataggataagatttatcttagacacagatcaaagggatttagctacctaagggatcatctcatggtgtacattacatcgcacataataatcccacaaggggaattcctcataggctgagtgctgggcagaaaactccagagaacatttggttgatgcctaacatatgaagaatactcagcaccatggctagaacatacctaaacacacggtagatatttattcatcctttcaaagcctggtccatcatctgtaatttcccctcatcagaagaggacatgtgttcaagaaggaaagtgttatttctaaaaagggatgttaaacctcattaaaaagcacagatattagtattttcaaatgtaattatgcctaacagactattaatattgtaaatgtaatcttgtggttaggatttgctaaatcaacacatcaataaactctagtttatacaattataaaacctattttcacacttataaaaatgacatttgaaaattaaaataaagcaggtaaagaaacatttcattgtgggtgacaacgaattttgtgcaactgatttttaaatcaattattggaggaaaaatagattcactttagtacaagttccactgattctcaagaaagaaattgaatgttcaataaataagtaattaaataagccgtttaagttaaatatgcyttataatgcatattgaagcttttaaacaatactaaaaatatgagagaattcttttttaattctgaatttcagggatctcaataattgtattaagtgtggtagaaaagggtgatcaacaagaagtaagggccaagccagagtcttttctttgccagttcaagtgtttcaaaagacaacattcatgtctaatggagagacgacttaaatgtacttattcactggatgaggatttgttaagtgtttttcatttgctaagttttgtgtacaaaactcatcagatctgagccctgatattccacttctttatattagtatttacaaaggtcttactagtatttacaaaagtcagacaccggtccaggcacttcaaacaggtgggaggcaagatagacagggccctgcccttctggagtttacggtccattgggcggtagggagaaaagggacaataaatgataaacaagtaagcaaatgaatgaatgagaccatttcagagattagtgatagcaagaagacaaaacaagaggatgtaaggaagcaatagaagtacatctcaagaggtgaaatttgagcttagccctaaatgacatgaggaaggcagacatgcaaagaaccagggtggaacttcaagacaggggaaaaggcaagtgcaaaggcctttagaaaaatagttaaaagagattcgattgaaaagacaggcaagtggaagctttctccttcccctagctgcccaactcacctgccccaagtctttactacatgatgttagaatatgatctacttcttttctccagacctggaaatcaacccaccaggccaggggactgggttttgtgtgcctctagcaaattagacttggttttatctacttagctgtatttaggagttcttatattttacatggaagcagtattaaatcaaacaatttataaaccactgtttataagtgaagaaagtaagctctagcctgtaagagcaatttatagtcaaggccagggttaaaatacctggaactcccagtgctagtcatcttggggagacacattaccttttaccttcagtcactcttgggctgaaacatgacagctgttgatatacttgagtgttattagcaggttgagaacagtgatctatagagtaaaacactcagtgcattaagaaaagttggcatctcaaagatagatacctagagtttatggggaaacgatggtctccatattgttgacagaacacctcaaatcctcaggccactcatcagcatcgttattaatcttcttctctaagtcaaaggaagaaatatatcaggcttaaaagccctaaggggaacagaaaagaaaaagagacagggtaatttataaaaaaccattttgagttttgttttgattttcttaaaaaggacaatttggtgagactattaaaatcagacatatttcaatatgactgacacatataatatataaacatttttgaataggtaatccattcacaaggcatataaatcaaaatgatataaagaggtagtcagcaaaatgtttctacttcatttccatccttcttttccacaagggtaactttttattagtttctttgtctttgtttatttgtgttacataaacagaagtatatattgttatttctcctcttttttatacaagatttcatattatatatagtgctgtacactttgccttattatttaaacagtatgtcttaaggatttcagcatagtatttcagagaatggaaatctttcccatcagcccatagagaactccctccttatttcttttgaatgtgcatagtatcccattaaataaatgtaccacaatttgttaaacacagtcctttataaatggatatttagtctaattccacccttttgctactacaaccaatgcagcagtgaatgtttgttcataacatcattttgcacatgtacaattatctacaagttctcagaagagggatttttgtgtaaattaaaattatccgtttgcaatttgggtaagtccatggttggggggacggtgcgctaaagtatcctctactgccaatcatgtatgagaatgtctacttacccaatagaatgtttccttacactcttagatttttgacaacctgatagatgaaaaatgtcacagtgaaattttattttgcatttctctaattatgattgagatggatcattttttcatgtttaagtggaatttgtagtttttgttttgctaattttttactaatatccctttcccatctttttattatgtttttcttaacttatattaaggagattcactttttgtgctatgaattgcaaatgtttctcaattttctttcatttgtcctggctttacttgcagaggtttttttttttttttttttctttgtttttgctaggwaaaaggatattttgttgtagtatttatcagtcttacatagcttctggattttctcctaaaattatatagcttcattttacacttaaattctttatccatttgcagtttatcatactgtacagtgtgagatgtttkgtttttgtttttgtttttgtttcctaggaractgcctagtcgttccaacacaatttatggaaacgtttattttcccccttctgattatactttccatctccatcatatgccatatatacttgkgtctattcatgtagagataccatgctgctttaattattgaggtttaaaaataagttgtaacatccggtagatcgactttctttacataattctacataatacaaatccatctgctgtgaatagaaatagagttgattatccaaagcccattgtgcaatttcttgggtcagaagccttttggcctccatcagaacagccttcttcgctctacttctattctctgcatacccgccccactctccactccatcagattgctttctttctttttctttttccttttttattttttattgttttgagacagaatcttgctctgtcaccccggctggagtgcagtggcataatcttggctcactgcagcctccgcctcctgggttcaagcaattctcctgcctcagcctcccgagtagctgggactacaggcgtgaaccaccacaaccagctgatttttgtatttttagtacagaggggatttcaccatgttggccaggctggtcttgaactcctgacctcaagtgatccgcctgccttagcctcccaaagtgctgggattacaggtgtgagccaccacatccagacaaatttcattattaaaactgacatttgtgggcactgagaaccttgttctcctcctrcgcttgtgctctcctcctatttgtcagatggacaaatgcagtgctttttaaagcttccacatgtgggggacctatatctgcattctaggctgttggatccaaatcctacaagttgttctggagagcaaataatcattaagtttttgtagattcactatagaaatatatgcttccaagaatgtgtgtaggagaaataaacataaaggacataaggaaaaagaaaaaataaaaaagtcrttgttcaggttccagaggttgttgcttggctttgagcaaagcactgaattcctcctgtctgcaaggcagcctctgcccaccctggccctgtgctgtgaagtgacaggtaagcccctgacagctagagaaattaacacagaagcaaggctctatgtttcctcccctttctgagcagtggagacagaggctgggtgggatagagagaaggagagagagaagatagagaagagactgcaggagcagagagagagaagggggataagatagagaaataaattaaacacacaggaagaaaacttcaaaaaccctatgccgaggcagcagctctccaggactagtaatattgtagtcatttttaagaacctcaggcactgacagcattttctctgtgggtacttctaaagagggatagtcctgtcacatttgtggtcacaggtcacaggagtgggagccctggcaaacctcctttactggatgagccctggcctttcatcctgaggcctcccatggtgggtcaccttccttctcttctcagtccctagttcagggctgtcatgcagcagagatgtcgccccatgtggtgcttcagagtctgggagtggcctgggcatttggatcagaagatgcaaatccagcacccaccacaacccaccttgggcattttgggtatctgagggtcaccctcatcccttcctataacatactgtgagggtggaggtgggccaagtactccgtgctggaaaccgggaaaaaggcccaaggggcagggaagccttcacygagacagggtgaaggccagggctggccagtggatggaggcctggcctcttcctagcagtgatcatcttaacacacattagcaaatatttcttcagcattcacaccacactaggtcctggggataaaatgatgggaaaggcaaagttccatccttacagaaagtgatgatttggtggaggatgtgaatatatataccagtaattaagacatacatttttcattatttctaataaaaacgttaaatgttaaaaaagagcacacatactatgagatatgtactgacaaccacagaaacacagggacaggaccaaatcaaagaaaaagcaaaaacaaagtactgtgaaggtttgaaaaaaacaaatgaccacatgttgtgggggtctcagtggagactttgggaggaggaggatttgactcaggctttcactcagacctcagaaaataggttgaattatgtcagaagctctgtataggtatctactgtggctataagaagggattactggtaggggtggggctgggaggcattcyatggcattcaagaatcttccttacttgtgcacagctcacgtgctctcaggtatgctggcagtgcatcttgtaacaaccggagatggggcagcctcctgcttctctgccgttgcacctccactggtaatgtaacaacagtcccagcagacacacgtgttccaggaacaacaggagccagtttagctaagactaaaccacacagaaggggaggtagtgagaaattaggctaagacctgggtttgagttacctttttagaggaccttgaatgtcagctaatgagtcaagaactggtattaagaagctctaaatttgttagcttttcctaaaccttcctatcagaatcaccatagaggtcactaaattgcaaatcttcattctcctttgattatactagtttttcccccacgctaataatggatgcttatttcctcttcaatttttgccttcctgacttatgtttagaagctttggtgcatttttggatttaatattttgatttaatctatgtatgaatgatccctaagtgctgtggtaaacaacttgttattttgttgaggcctttgaaattagcgagtctggagaagtagcatttcacttagtactgagagggtggagcccagcccaagatctatatcccagtcccatttgagttctatttgaaacccctggtagaagatttattttatgggcaactcatatgctacagtaatattcacaaaatacaaagaatatattatattccattagtattgcaatacagttgtttttggttattcatggctgttgtcctgaacccctattaacttcagcaggaaaggtaccagattcaagaggccaaagaagagacccagagccagctaatgagacatggggttttattcaaggcttacatacaggggaaagagtccagagatggtgggctggacaggagaaccgcattaattacagaaatgatccagcagcagtgggatggacacgatcgtccccttacctacagtccagtggtggcaggccgggcagaaaaactgcaactgattacaaacagcatgcagtttatatagtattttcccttaacaccctccccttaacaacctccatctggcaacyttcatgtaacccaaaactcaaggcttcaattccttgtatggcttgtgtttcatgggatggactgggggctcaggtgttcctcatagacaaggaacaaatctgtgggttggctactcccagattctctagcttggactaacattcaggtgtgtctgccatgcagggccattctaaggatacgttcaaggtactgccaccagaggcatttaccctacaatggctaatgcacaggtgcctccttaatcccaaatatatattttcagggagttactgatgattccagaaatgtgattgctattctgggcactgaacttacagggaactgcatttctagtttcagacaactgattaataaattagcctggaggacctagacaatcaacagatattgggatgtgagtatggtgtgtgcccaaaaatggtaataagaacaacatgaaataaaattaaatgaggggagggaaaaataaatctggcttcctgccccaaagtggctcacacccttgtaagaaagatagatatatgaacaaataattacaaagaaaactgagtgtatgataataaaggcattcccaagttgctatgaaattctgagaatggaatgcataacgtgagagttggtgtgattagaattaagaaagtctccrtggctgaagttggatatgccaggggattttcaacaataaataggttattaaagatgaagaagacagaaaagggcactgcagcttcacttggaatttaccgaaattgtttttttttttttcatatttttccattctttttttctacttatattgagctgagattttttaatggcacaaagtggggacagaatgaggtatctttgataaacaaagatgtattgtgacctgccaggtctctgagttgtttctccaagagattgagaaatgccctctgttttggctggggctgcgagtaggtcagagtctcccagactgttataagggaccagctcttcttacctttgtctttactgttaccaacctataatcaactaaggaaagctgaagtccacagatgaagagaaagagaaacaccctcaaggtgttgagagttaatatgattaaaatgagcccatctgtgcaggcacaaaccctcactgatcctctcagtcaggtagcttcccccaggcctgcttggacagatgagatgtcaaatgtgcttctcatcctcacagcacctgcctctgctctaggttttccagccagggacaattacctacttaacaggcaatttattaacatattttatagattcataaagtttaacttattctccttacttcattgtaagccacagagtggcagtagttaggagccatttgaggttgggaaatgggaatagttaaccgaggtttcccagtccaaaaaaccgagcgattgcaatgctgctctgggcaaaggcccaaggcttttggcttaattatgctcgctggctcttgcctcatctgtattctgagaccttttcccctcaaaacacttctctctgtttttctctactctcacaggcttcgttacttcacattggacccactttttgtgttattcatttctgcctaacacttccctgagggtaggagcaaagggggcagcctctgagtggtggcccaggtggccacccagcatagccccatgctagaagctggggcacctgccctggaggtcacagcatctagggctgtactgctgtcacaatcccaatctcttcattttgcagtaatcaacttgtggtgggatattatctagtaaaatggggtaaaatctgtaagcagaaaaaatgacactaggacattctcaattgtctttcaaatgattatggctaagccatctaaaggtaaaaaactttattcaaacacatcaaaataatcaactgttccatagattctcccctccttgtcatcaaaaatkcctgggcaactgctcatggsatcacagagcttccaggatgttagcagaactgtagtattccaggggccttagagcagcatcttccacgggtgccggtaaatgctccatgctgtttgctttcacacatgcacaatgtttccaatgactggccacctaccctcttcattgaagagatgaagttaattgcacatgtgtaattaacaagggaacagactagtgatcccaaatggtgcacaagatgatccactgacggataggaagaaaaattttatttcctatctccattgatttttatccatacattaatttgtgcatgaatacacactaacaaaaagtttggagacccctgcactagaacctgaccagcacaaaacaaagcctggtgaatcctctgtaacactcatccaaagcatacgtgcatggatgctttcctgctatgtgtgggctgactgggggttcccagacaacacttggactagagctaagaggaatcctagccacctgcagatgtggagacatgtgcttacatgacawggttatgggacttgtaaaagaagaaaataaataacaatcttcctgttttgcttaatttatggaatttgagaattatacatctatttgcaatagtgatatttttctattaccattttttccctagatttcaacaatggtttcctagaaagcattagttgaacaagatagctagctagctagctagatacatacatacatacatacatacatacatacatacatacatacatacatacatattcccatgcctagaataaatactagaacaataggtggggaaaataatgaattttgtattggttcatcccaagaggatctgtcactatgttcaaggccttcattcttctctatttttgctgtcttgcaaaatatgaaacactgatgtaaaacaccctattgagtctcacatctctgtataatgggcattagctccatcaaaaagagcaagagaaacacccaagaagtgctgagagttaatgtgattacaatgagcccatctatgcaggaacaaaccttcactgacccctcaggcaagtagcttcccccaggcctgcttggacaaaacatgtgcaatcaayggacagagcttccacctagtaatgcaagaatggaaaaggggtaacctgagcaaccatggaaaccttccttgatgcagttgccagctgaagcagctccacttttctttgattatttaccgtaatctaccagattatggttctataccttgggctttaaagatgaaatttagtcttgtgagatgaaaagttccgtcagccagaattctagagagtttgagagggtggaagagggatttggccaaggcagcgtgaagttgattcttaagagaatagcaagcccagtggaagccacttctcactgtgtagcaagggaggtaattgacagcagtggtgacacaggaatggagaaggagaaaatgatctgagggcatacttggcataaggagacagagaatgacaaaagagatggggaagacaggcaggatgagtgtcaaggggagaccatgggctggagagagaagagaaatcttgcttgggagttgctgcagggcatggaatgaggaggagaaagacaatgatctctaaacatgaaattaagaaattcagcttaacattaagaaagcatctgcatcctccactccggccacttgtgaaaagcactaaatacaacactgtatttaagaaacatggaatacatctgaatctatgctatatttttttctcccagacgtttttktctttgaatgtgatacaaagcagaaattgaaccacgtaaaagtttaattttgctccacctgttggactttctggtgttctggcaagactgcttsaagtgccaaagttttctggctgcttacctgcccaactacaggtgcactgaatttctttgaccactgtgggatgtcaccactataaaatcactcctcttttcaaagagccttccatggagaaagtaaagactcctcagtatataaattaatttttactggcataaaatataaaaagctattcaaaacagagaatcaggtcagaaaatatcttatggcatcttccaactaggtactcacaatgcaaaattatccatacctacaaataagagtcacccttaacctacttccttgtgccagagctgggtgctgtggcctgagagccatctgatgatagccatgagctctcaggggatctggattcagaaggagaaaccttgaaagggttataaagaccttggtgtcttccacctggtggctgtcctcactcttagagccaacaggtgtacagtcagtcctttcagtcaaaatgtcttatcccctggtcccagagcatttcatgttgctttggtacactgccctaaatcctaataagttgcaatgtgcttgttctacagaaaggatacagctgccaggggcagaaatctygctctcaaccagaagatctggaagggagcccggctctgcctgctactgcccctgtcacctgagcagatactggctttcccccaggttcagtttcttcaaccataaaaatgaggaattgctggtctcaacctcataggattattaatttttttaatgtaaaatttatattagagtcaggcatgttggtgtgcaactgtaatccttgctgaggaggctgaggcaggaggatcgcttgaacccacgagtttgtgaccagcctgggcaacataatgagaccccaactcaaaaaaaaccaactatttgttattacttaaattgcagaaataatgcatgctttttttacctaatgaatcaggtgctaacacctgttacctaacaaagccaaataaaagcaaagacaattttctcccttaccccctccattaccactcttctrctataggcaatacacattctattactaatgtatattcttctaccctttctccatactcatacaaacatagataaataaatatggtggaatttcatttttaccaaataatacccacaatatatacattattctgaaattagattttttcccactcaatatattgttgttttgaggagcatatgaaatgagactcatgaaagagcttgataaattgtagtcaccactctttgaagcttacaagatgatcaggtagcttggaattaggtcactcaacttactctccctaacatcaacaagagagcagctgagtgaaggaatgagtgagagttgattgaacacgagtaagtcagtaatgctgttgcagagaatgcaaaattgccacatatgcctgccctggatggaggctgcatcagtgccaacaatgtgaggacccaggggctggggaagaagcgtgccaggaacacattgtccatgtttggccctagaaccaagtacactggcctggcacaaagtggccaataaatatgggatgagatgggagaggtgttggatgaattaatgaataaatcagtgagctttgaaaagaacaaatgaaggcacaaacaaggccacaaataaaaatcatttattggctgggcgtggtgtctcatgtctgtaatcccagcactgtaggaagccgaggcgaatggatcatgaggtcaggaattcaagaccagcctgactaatgtggtgaaaccccatctctactaaaaatacgaaaattagctgggcatggtggcagctgcctgtaatcccagctactcaggaggctgcggcaggagaatcgcttgaacccaggaggcgaaagttgcagtgagccgagatcacgccactgcactccagcctgggtgacagagcaagactccgtctcaaaaaaaaaaaaaaaaaaaatatttaaaaggtgttgtggtgaaaatgagaaagaaaataatgagggaaaatggggaattttttccaagagagttgaagatgcatttgaataagcaatgcaaaaaattgctgacatgctgaaggctgatggcaggggacctgtacttgtttcaccagccaagggaactccagagctgaactggaaaccaggcttctcctttaccttttgacattaatacagtttaacatactgctttggaaacctcctcagggaaacctgcctctgaaagcagctgactctaggagctgaataccttagttattctctttttctttctttaggtctctgtaggctctcaggctttcctggcatagcgtcctgattccagatgcttctgcactgctcctgttaaacttaactgcatatctgcaaactgcctgtcaaagacatgacatccaaagggtccaagactgacttctaaactagagtttctaagaataatttcctaaccccttgatatttgctgttcacctattagcattattaaataagcttgtgaatattggctttatggtaaagagcaagtaacytacctgttatttatacaagtctggaacctttaaaactgattattattatctaatatctttcaataactttcctcccttttatttcatggaactcatactcaacataggaattcctgagtcagactgcctgcattcaaattctgactccaaagtttgtaggtcttagggtaggttagttaacctctctgtgactcaattttctcactcatacaacggaactgataatatattgcctttcatagggttgctacaaaaagcatgtgacagacggtctgacatatggtaaatacccagtaaaggttgaaaaacaagcctttaaaaaaacattgttggccgggtgcggtggctcacgcctgtaatcccagcactttgggaggctgaggcaggcagatcatgaggtcaggagttcgagaccagactgcctggccaatatggtgaaaccctgtctgtaccaaaaatacaaaaattagctgggcatagtgtctcctgcctgtagtccgagctactcgggaggctgaggcaaaagaatcgcttgaacccgggaggcggaggttgcagtgagccgagatcgcaccactgcactccagcctgggcaacagagcgagattccatctcaaaaatagaaaaaaaagtcattattttaggaatgatgtctattaatcattaatttatgtttatattgaatactcaaaaacatatgcggccaggcacggtggtcacacctgtaattccagcacttcggtaggctgaggcgggcgratcacctgaagtcaggagtttgagaccagcctgcccaacatggtgaaacgccatctctactgaaaatacaaaaattagctgggcatggtggcgggcacctgtaatcccagctacccttgggaggctgaggcrggwgratcacttgaacccaggaggcagaggttgcagtgagccgagatcgcaccactgcattccagcctgggcaacaagaatgaaagtccatctcaaaaacaaacaaagaaacaaacaaaaatcaaaaacaaacaaaaatatgcaactgagtatgcaagttgagagaaatagaaatttaaaactagcatcaaatgtagggttgtttttgcttttgaggtgcattagaggtggttggtgctttggttgggataaaagttccattctgaggcagactctttgaaacattgaaagtagatgcctagaaccgaacccctcagagtactccagctggatgccactgctcaaatcatggactgaggggctgtaaatgcacagctgtaccaccacaagcatcactcagcaaacgatgattgtcatggtgcagcaaagtgggcctggtgaggagtatataaagcaatgccctgcagaataaagacaaaaataaagcaacgatacactagagctataagtccactcgggtcctctcagagggtggtacatgtgtggggtgtttctccagcaatagagccatcctccacctacagggtagcccacatctggctgattctgatgaaagcaatccctatcactcctgagctgaactcaggttgtttccaatctaagctaactacaatgccctagcactgtgaaagggactaaatttttcaatttatcattaacccagctataccattcctaagtgcacagcaggcaggctcaactctgccggatgtggtgtccagctgaacaggtttctgtatgtgttccacttccttataggaccaacttcacagcccctcaatcaatttccatctccttctctggaaataaaacaatgacatgctgttgctgccttttcatgttggaagccaatgcttgtagtgaaatgtgaagagagagccaattgctacttcacctctctgtggtcgtgctaggaaccttcattctgtagtgaaatggaaagatccagctaaagcagactccttcatgggatgaggatcttacagcactacttcctgctgtgaacacgtgaattgaaacatcagacccacatctgaaaatattgggctttagtcaggaaactgttcaaataatcaaagaagattttcttgcttggaaaatagtgtgaactggatgattctacctcagttctgagtgtgattccttttgccaggttgatttttttttttttgaagaacattttttctccagttttaaaggccctcaaaagtagagtggattacattcaactttctaattagaagcaagaaaaaaaacttaaaggatctctgaatagtctgacctaatgtcaatgggcatatacatacatgtgtgaaattggagattacacatctgctaacataacgtgaactcagtcatttagtgactatttaccaagtcctctctagttcctgatgttgagttgagtgctgggtctgcagcacgtgaagcatgtgtgatgtctccatcatggggaatgggatccagaggagaggaaaacaggacaaataaataaataattaaagatcatagtccgtgcacaaagaagagaaaatgaatcaatgttatttgccttgataaaaaattatccttaattaagctttcctcctattagtctccatcattttgtccaattgcttcagctgttttcttttaaggcctaatgtatacctagtgcttagctttccacctgaaaacacaaaccgtagaagttccagtgaggaaccatatagtatttgaatagggttacctagaatatggaggaaaacaagtgatggaataaaagtatgaaatcacttttgaaatatgaatcactttatgaaataatcatatagggaaacttcttaactgaacagactctttaaaccccaggatcagttgtttgtgctctggaagactaaccgaaagagtaaaagcagaggaaacctgctgatagctgtgttccctggtctaccctcttgagttagtgaaacaacagcaggcacctaaaaaagaaaagagataagccccttccccggtggactgtgctccgggtgggaaatccctcctacagagagctgagtgaccaggagggagtcttttggaagatgaatggactgctattagacttcagggtccactgattgttcttaatgggaagctacaaggatcaaagtgcatctcaaagcattgtcagaatgagcccaatgcaccttgcactgtcccacccctcctcctctgacccttcctgccgaggtcacttccctattagtcaactgcccccacctcaacccctgggctttttcccagtctgtggcatcagaactaggtacttatttctttagtgcctcatgtaatcctgatattcatatgaagttcccactgctttaacattagcagagkttagtgacactaaaaattaaagcattccttaagccaggccatgtagagaattatttaatttacagaacacttccaactaatgatgctcattagcttactcaaaacaaatcattatgactttcacctcttttctaggacaggccgagcatagaaatattatatagggatttctttctacaggggacacctgctttccttttctcacttagttataaaatacctttcaaagtgaaaccttgtcagtgttgcataattgtgcttagaaacgtttattcagtaagagaatgcctggtaatgaagagcgccctaaatctcaccaaggatgtgtcaaaaaataagtgtacaagtataaacctgtatggaaaaattgaaaatgttatatctgtgctccaaattctacaaaatgggcatatgggtactgcccacatagattttatgcagattcttagtatattataaagtctacttattggccaccaatgcacgcacacacaccctagtgtctctcaggtatgaatggactgaactaaggtggaaatgtaacttgagcaacattaaaggatgaaaatggttaatatgcaaatatgagaataatatttttctgtatgtggcaaaggtatgtaatttagaaatagtaatttgccgagacatggaaacatatatcaacattttatgacattattatttgaggcttcagaacacaatttataacctctatcttcatctctcttcccttgcacacgcacacaaacatgcacacacgcatacagtacagggccacctgtgacattgcactatacacagataaacctgttagcaagttcactcattagctcctgtattttttcccaaagttgtccactataatcattcacctgtgttcttaaattgtctgccattatttgcttcattagtgcctctcagtgaatgcttggatttcacaaaggtcttacactttccatggagcaaagccttcagggtgctgagggttgtgagaaaagcatagaattttccttgataaatggctactcttcagcacacagcactacaatgaaagactaattcctaatttgtttgttctacatgttcagcagcaaagaaccataaacacaaacacatagatgtcaaactagcttagactaacttctataaataagttataatttgcagataatttattaccatgtaacagtagaagctttattaactaagtagtagtctatgtagacttgcctttattacttataaaattgtacttttcttctaaatttactggtacacaaatatcacaattagagcacgtataatagtgctttagttctttttttctgatgtctttcccccaccaaattgtatcctgttcaagggagactacacagttactctatctttttgtctccaatattcccaggtacaatgggtcttattaggtaaaggtagctaagaatttgctgtgcattccagttattctgtcaaaatatgggttttctgaagttgggactattcacaaaaaggaaatgtacacagaagattataataatgaatcttgaagattacatccctaccttttatgcaatgcaaataaaattatctctttctccttgctatgagttatttatccacaaggatattaagaatagagcactgacatgatgctcaaagtatatgctcattggagaatttaggattttggatttccagattaggaatgctgaaccagtatgtaatgtaaatattccaaaayttgaaaagatttgaaatctgcaacacttcaggtcccaagcattttggctaaggaatactcgacctgtactactactcaaatttatcaataaatgtttgttggatgaaagaccagatgaacctgtagcccatctaccaatcctctgatacacaaaatatttttaataagcccatgctcatttgcattcagatcttctgtttaaggtactttgcatttcaaaagaataatgtttttctctattctaagattattgttttcattgggtaggatgttaatccccttattttcaagaataaatctaattcattatactatgcacaaggatctgtattttggattctcaagttctaatgtatctcatcaatatgtatctcaacagtgatttttttaaaaaaaataagttttatttagacataattcacatgccacaaaattcacccatttaaagtgcacaattcaatggcttttagtgtattcacagagtattgcaaccattaccactatctaattccagaatgtttcatcaacccagtaagaaaacctgtgaccattagcagtcacccccagtactcccctcccctagccccatttagctatatcccaattgggaaaattatcttaaaggctttgtttaatatttttttgtaattagaataagcagtggacttttctggtgtggtcatttatcactcctatgccactcacttactcattagctctacaaatattgactgaatagtgtctggggcataaaagtgagggagagtagacagttccacatgtcacatgctgttctttcttgaggaaagctcagactacagggactatgtctcatttctgtgcttgattgctgtaagatcagatacaacaccattttgcatgaagttagagcattaagttactagaataccatcatctgatgtatctcaccctttagagctgtaattacactcttatagggatgcagattatgcctgtggcctacaagtttatccagagttagaacctggctccaatcagaagagaccacaaggaatataaatgaagaagcctggcacgcttccatctcacactccgcccctattctaatccctttcaggggaaactgaccagatgtggccagtgagcaccaattcctcattcctgtgcacatgtgccttccactgggtggtccatagttttaccttaatatactcaagtcattattttgagtattctgttgcacaaattctttgatgtgggaaaggcttacctaacagacaattcctgcagtaccttgttacttctagctcacgattgtgtgcatcactgcatatgggcttataatatttactaattgtatcctgtatttgtcttattttcccaaatagatagcttgtgtcagatgtttctgtgtctctgccccatcccaacactgtcacctcgtagtgtgtcttcatgccatttatgtatgacgattgataggagttggtttagttgtcagtagaaagccataggttgaatcaccttttctcctgacccccattttctgacagtattcagtggaggatcgggcccctgccaactggtattgctgaatccctgcttttggtctgcggtcctagtaccgtctaccactggatttgcctggtgtttgaggacctgtcatatgcctggctctgtgctaggtgtttgaagacagcaaccctcttctgtgcttatcctgtatcttcatttttatcactacattgaccacatggggtgaaggtgaaggatgttgggtttgctgtcttttttccataggctgtgagctcctcatgggcaggatagagttttacacagagcctggtacacaggcccttagtatttgtcatgtgaataaataaattaaaaggcagttgttagcagctttctgactagctaaaaagacagcacacatacatttgaaacaatgagagagcaaaatagtatcatttaaagtgctaattatgtaaaccagacaactcataatccaaatacacttcaagtacccatggagtatggtgttcacaaaacatttcaagtacaatccaaccactaaaattcatttaaaagttgattagagttttgtttgcatctcttaaagaactttaaaggagatgtaactcactcaacagcaacacttcataaaataaatcatctttgtcctctcaacttcttgtacccctttttactctgcagcctatcactctccagttcccacatctctccccataccttccagcacctgctttcttggtatctcccccttccctttttctcagtggcagactgagttagccttgctagcttcctttattccctcgttcagtcattatcccaagtctgtgccgcaaaataagcctggacccaacccgatgagcaagagaatgaatctctcccctttagaaagtgagaggatggggaggggaaacagtaaacagcagttgtatagggaaagatgatcaatactgcagtattggaatatgaatgtttgtccttatgacaagtgcaattaaattgagaaatggggagactctgccagggctggtaaggagtcttgctctccattttgggggtgctgtggattttatacattcatctactgaatcctcacagtcacctgcagaatcctaccaggaggaaactgggctcagagaggttaagttatttgacccaaaccacttataagtagcagcaaaaatgtttgtgcctacaatgtgatgtcacattctcaaagatttccataaatatatcctttttggtaacactgttaggatggagctagttgaaattgtgaagcagaaaaaactagcagttggcacctttgtgccttccattgcaggcctccttctccggagagccctacaaacattcatcaatgttccttcctccgcccctggcacacagacacacacacgatatgcaccaataacacaaaacccaaaacacactccaaatctgctcctaggaaataattaaattaaaacaattggagtgttaccctgatagtgctgtctttattttaacaggagataaagctctatgacaaagggatgaatgtttcatgatgcatttgccagtttcagaagaggtggagatttgtagtcgtccctaagataacaccccataagtcacaactgagtccacctgcttagaaggcggcttttgcattattttcttttgtaaatttgaatgcatttagctgaatttaggatgcccattgataactaagaaagaaaatataaaaaatattgacatgtgtcaactgtgtgctgaagtctgtgaaatgcttgtgtgtatgtgtgtgtgtaaagaaaggagagaaagagcaaaataaaacttttatcttgagcaaatattcaatcacaatacaatggctaataataaaatagtaacatgaaactaagtaagaaaggatgatggcattacaacctccagaataagaacctaggaaatgtgtaccttctgagaattgttccctttaagtattggatttctcatttcttaagaaagtgcttcatggagggcatgtggctaggatagcagatttgaattgtgctgatagaaaaaggcacattcctccccttacagcggattgaagtgctccctgatgatgttatcctgcagagaaatatagtcaacccccattatatgccagggattggtcccaggacctccacatatacctaaatctgtgcatacttaaatcccacagtgggccctgcagaacctttgtacaagaaaagttggccttccccataagcaggttttgcatcccacagatattgatccacaactggttgaaaagaatctgtgtataaaagaaccccacaattaaaacccgcgttattcaagggtcactcacacacacatacatacacatattaagtatatacacatgtaagtatgtgtatgtgtgtcttagtttgtttgtgttgtcatagcagaatacctgagactgggtaatttatacacggtagaaatttatttggtttacagttccagaggttgagaagtcccatatcagggcgctggcatctggcaaggatcttcttgatgtgtcattccatggtggaagggcaaaaaagcctgcctgcagctgggtgcggtggctcatgcctgtaatcccagcactttgggaggccgaggtaggtggatcacaaggtcaggagttcaagaccagcctggccaacatggtgaaaccctgtctctactaaaaatacaaaaattagctgggcgtggttgctcatgcctgtaatctcagctacatgggaggctgaggcaggagaatcgcttgaacctgggaggtagaggttgctgtgagctgagattgtgccgctgcactctagcctaggtgacacagtgagactctgtcttaaaaaaaaaaaaaaaaaaaaaaaagcctgcaagagaaaggaaagggttaaaattgtaaaattcatctttttatcatgagcccactcctgcaatattggcattaattcattcatgatggcagagtcctccagatctaatcacctcttaaagttcccacctctcaatgtcgttgtattggggattaagtatctaacacatgaactttgggagacacattcaaaccatagccatgtgtatgtttggaatcattatatccaaaagcatttctgaaagatcatagctaatacttaaagcctctaatctgaaatagaatagcttaattgtataattttcaacaaatatagtggcttttggtggtataaaatacttataagaatttgtgttactaataaaaagcatgaaagccacttttcccaaggtgtaatataataatggtggtaaattttctcaagtcaaaaatacatgattttattagtaataattttctctcttttggcccttaaattcccaaagcttcttgtagctaagttaaaagcacaaacagtagaattttagcatgagctgctgttttctctggaaccatttctatcctatttgctttcctttgtttttaactatsaatgtaagcttcccttttcataacaaaaattactcaaatacttgtactgatttacatttactargaagccagtgcactttttttaagttgtgcccttaaaacaacactcagaccaatgaaatacacaaataagtgtgtcaagactgttgcaaagtctatatacctatcaaaaatcttttgcagacacctttatgaatcatagattacagatgcatcggttctctagagttgcttaagtcaaagtttaaattttatggaaccatgtggtagttgtatgatttagcaagcattttctttacatagtggagtaagtggttacaaagcactctgggcccatccagcatggaggacaatggagcagaaagaggtatatgagataatttttcagaaaggagggggaaataaaattccccccaagggcacttacttgtcttccatgtccaagtcatcttttcccttccagcaaatcagcaaactcaaatctaggcagtgaaaagcaatattttctgcacgtgtgaaatgactcccaactccatgaggcgccttgcttaggatcagaggaacccaggctggctcttctctggggtcccaggttccagtgatttacaagctgtctttatgtgctctgctactgccaggtcctgctctcaggacaatatcaaattagggttcagtgtgtgccaatgtgttatgctgtgccctaatctcagacaaatatgggcgccattgaaactctaatggacagtgcacttgttttgcaggatctcagatcaaggacatggagtggaatacagactgactcctcaggaggttcagttcttctgttcttattttcttctagcaagaaatcagtgggcttctctttcaggacatgaagatgacggcaagctgggtgaaatatgaataatagagatttcaaatgactaaaatgcagttctaattttaaaaaggagacaaaataactactaaactcgcatgcttgctccctagaactgtatgactttcataatagattgcttaaaatagtattcaacaatatttaaactgtcacatcaccatctcaattctgatagatctgatacctgaaatacattcttttctcacttacatagagaagtcagtaagtccaaaacttcctcatgtggattttctagaactttttttttctttctttctttttggctaatagataaccttccaaaaatgggtctcatggtggggaacacttgggaaacaatgtattaaacaacgttcaacagatttcttgtgtaagagactttctcaaaggcattaattaagtctacagacatatccctttgtctcccaagaggaggccgtgtatgaagtgtttaacctggaattcttttttgtatgtggaaacccttcagcatcaatactgtgcagcacttactatgggaaatactagtttagtctcttctttcttcaatcatggcggcatggctgactgaccacatagctacctgctacctagccagcttttaaaattcaaatcccttccccaacctctagccttctaccttgttcattttccagggtagcgtgttctggcattttctttttttctttcattcttttttattctactttttaatttgtttattatctctctcttcaaactagagtataagctccttgaaggcagggactttttaatctcttttgttctttgacgtatccccaggtcctgaaattttaggagtctacctggctagagcaggcactcgatatataggttacataaagcaatggtaaattcaaactatccgtgccagaaaatttctgtgttttcccacatggttaatttgtttcttcacttaaataattattgagtacctactgtgtgccaggttctgtattcattgccaggacatcctttttagtgaaatgtagaaaatatttcaccaatatctttttgtcacatgctgtctatcttcaaagacaagtatttggtttcctctgtgcttccagctctgggtttggccaatgcatatctttcagctgagccttgtaggttttgttttcaatgtgcaatgctcatctatgttataaaaaagtatgccttagaatggatgaaaacagctatataaagcatgagacaaccaaattcgaatgaggaagtgtgagatctctttcaaatgatttgaattagcattagaactaaattcttggactagacctcacctattatcaaggggtaaaatctttgctggatcccatgaaatcatcattcacttaacactattatgggacgaattgttaccccccaaattcgtctgttgaagccctaaccttcagtaccttagaatgtgactatatgtggagatagggtctttaaagaggtaattaaggtaaaacgaagtcattaggatggaccctaattcaacatgattggtgtcgttataacaagaggagattaggacatagacatgtacagagggaagttcatgtgaagatgctggaaacagacagccatctgcaagcaaaggagagaggcctcggaagaaactggccctgcctctgccttggtcttgaacttccagcctccacaactgtgggaagagaaatttcccttgtttaaaccatcgagtctgtggtactttcttatgataatgccagcaaactaatataaatatctgttatataaatagatataacaaaaatcttatacttgactcagtagtttgagacaacaaagtataaaccgaaaagtgaccgaggcagatctcaatcaattcagaggtttattctgcccaggttgaggatgtaggttgargaaaaagaaacacaagccgcagtaggatctgtgtcctgtgctttttccaaagagagttttgaggacttcaaaatttaaagaggaaagagcaagtaggaggggaacgaggaaaggaaaaaaggggaggagggtaggcaatgaggccagtgctcactctgtcacccaggctggagtgcagtggcacaatcacagttccccacagcctcaacctcccaggttcaggtgatcctctcacttcagcctcttgagtaactaggactataggcacatgccaccacacctggctaacttttgtattttttgtagagaaggtgtttcaccatgttgcccaggctggtctcaaactcctgggtccaagtgatccacccacattggcctcccaaagtgctgggattacaggcttgagccattgggccagaccagtggttgcattcttgtaaggcttgttattagtgttcagtgaatctgtattttacacatgaaaagagtaggtggagaagtcaattatacattgtctcgggctctcagtaaatctacattttacatacaataaagtaaagatgtgaaattacagctacctgtttgtgaacaaaaggaagtcagatttgttgttgtttgtttgcctgactcagtgcccaagcttaactttacctttggcatggtgagtttggaagtcctgagattctatttatttctttctcaagagaactaaatagataattataattatcttcaataactcctctgatggagatgcttacacggtgccctggagcaggcataccaggagcgtctgactctgtgggcttcgagtcaggtgggcaagctgggaggatgtggcccctgaccaggtttgaagggcaagtagaagttggaaatgggacgagcctggccaacatggtgaaaccctacctctaccaaaaatacaaaaattagccaggtgtggtggctggcacctgtagtcctggctacctgggaggccgaggcaggagaattgcttaaacccaggaagtggaggttgcagtgagccaagattgtgccactgcactccagcctaggtgacagagcaagacactgtctcaaaaaataaataaaacatatcattcattaaaaaaaaaaaaaagttgtagatgggctagaagaggggccttccaggcaaagcgagaggcacaaagcagtcagaattgggtgaagtctggtaggatcctggagggctactgtgtggctgcaggacatgaagctgaagtaaacagaagtcagattatcagggcttttaatctcttccagggaattacaagttttacttaaagtaaggtgttgggaagtcactggagggttttcatcaaggtccccagacccaaattttagcaacatttcttgggaagtgcaggaaggtaaagaaaccagtaatgaaactggtattgaaattcagacacagaatttagaaggccacatctaaagttacatgtaaagaaaaagcatttaagagatagtaaagggaatgaacatggcttgagaataaacagtgagcgccaactgtcaacgaaaagagtcaaactctgtaaaatatttgaagagatttattctgagccaaatatgagtgaccatggcctgtgacacagccctcaggaagtcctaagaacatgtgcccaaggtggttggggtatagcttagttttatatattttagggaggaggcatgagacatcaatcaaatacatttaagaaatacattgatttggctcagaaaagcrggacaactcaaagaggggggcttccaggctataaataaatttgaacattttctggttggcagttggttgagtttatctgaagagctgagattaatggaaaggaatgctcaggctaagataaaggattgtggggaccaagttttattatgcagaggaatctctcagatagcagacttcacagagagcacaggttgtaaactgtttcttatcattggacctaaaagggtgcctggttctcagttgattatctcccgggtctagagagaaaggaaggaaaacaaagagggaaggggattctctatagaatgtggatttttcccacaagagactttgcagggcaatatcaagatatggcaaggaaatatattttgggtctaaatattttttccttgtgtcacaatgttatgccagagtcagattgaaaagtaagtcacaatatatagggtcaaataaaacctatctgatgagaatgtatggtttgtagggcatgactccctagatcccttaggtaggaatttgggcaagataaaaaatcagagctcactccttaatacgaaatacccccatgagaaggttggtgggaagcagaagagacagagacttgaaatatggatcctaggtttagcaattatgcagcagagtgaggccccaggccctgaaagggaaaaacaatcaaaagcagcagaaaataaggagtcagccctcaggagctatttttttttactttaattttaggaagcacttctgcttccttctctttggagacttgcattcttaaaagattttagccatttgtagtgagttagaattttgtctttaaaaaatctccttagggccatagtcagtatgatttcttgaatattttcattcttcggcacaattcaattcaattccataaacatttgaacttctattacaaggtaggcagttactagagcatgattcttctattaagttcattttaatattttaatggtcctaagatttaggtggcttaaaaggggtagcacattagttaatagtgaaatgattgtgatagtaaaaaaaaaaaaaaaaatgcttcacatatgtatgtactttctgatgcaccaccacaaagtgtttatcatttgcaattcagagcaacactgtgaaataactgaggactactgtcttgtacagataaagatgtaaggaatataaaataaaggcagaaaattttatttttattattgtcattttacagtcaatttttaagaaggagatcaaaaccattaataattactcaggattggcaagtttcataaattcttgaattcatctttcccctgattgtaagagaaacaattgttcattgcagaaaaaaaaattagaatataaagtcaccctatttgtaacatccacaaataaacacttaatattttatgtgtattttaaaggtttcaaatatttttacatgttttcacaagtgtgtaattatctacacattttgcagcctgctttctcatataatgtcagctcataatttagacagcctacaaaatagcctgtactagagcccagtccacttccttattcaaggacctcatccttgaaaaaagtcagccctctcacttgcataatcaattatttcctctctactgggtcattcccaccagctcataaatgcactgcaatgtatctcatcttaaaacaaaacaaaacaagaaccacttctctctgaataccacatgcctcttcagtttctaccttcccttttactgtaaaagtcatcaaaatatttagctgcacttgccatcttgtattctctcttcagcacattccggtcaggcttttgctccaactacatcactgcaactgctcttgtcaatgtcaacgaccgtcacatggccatattctaaggacacttctcagcctgcatcttattcagcctctcaggagcattcaacaccattgatcaccatgtcccttgcaaaaattctgagatactctgaaaatgctccctttccttggcctctagtacaccacatttgttcttccattagtcaccacccctcaggtatctgtcctggattcttctcatatttctgcccttaaaacactggcaagaccaagggctcagtcctcagatctcctttcttctctatctccactaatttcttgggagacatcaccaaacttaaggcattacatatcatctacaagctgacaactcctgtaggggtgcaggaaaagcttcccttctgccctctttgaaggttggctggaatgaactgacaatagatagattaataggagaaaaggcatacaaatttactaacatgcataagcacaggggccatataaaatatgagactcaaagaaaggccagatgcttgaggtttaaataccctcttcacaaggggaagggaagtagggaaattgtaggggtagtaaatgattttcaggggaaatgaatgagcccaaagaacagataatagtttataaataaacagtagggaggggtctatcaaggtaagtttagacaaaaatcattaaattcctttgtggtactgctccttttcctttgctataaggtcatgcagttctccaacacttgttcgttcttcccaggagcatggctaagctctctgggtgtggtgacaacttgtaatcccttcatttgtaaatgattctctttggaaattgaatgggatgaaaaagtcactggaaaggtgaggggtggaactgtactgtgaacaagggttattttattatgcaaataaagttttcaggtaatctcttgaagctaccttcagaagaaaccacaaacaaatttaatgactttgtctaactctgtcttaaaagaatcctccgtactgtttattttgcagataggttattgatagtatttagtatggagaagcaatgtatacttagcaattaggggaggaaatgtatgcaaatagaagaaaatttatagctgactaaaatctcctacagaataaggcaatttataataagtacaatgcttcctaataaggcaggaccaatatggagatatgcaagttcattttttatactttcagagtgattactaagaatacttgttcattctgttccaataacaactttaactttctttaaatgacaacattttcaaatcatgattctcttgtcaaagtcaagtcaaacacatgcagctgaaacaagaataggaattttaacttggatttgagatgggagtttatgaaatatttattgctttgtttgaattagtaagcatatgcatccttaaagtcccacatgaagatggtcaacagttcaaattttactgatgtgtagaatttaaataagccaatagtacagaaatatagtagaggaaataagacgttgaactgtaagatctgacaggcctggattcaaattccactcggcctctgaattgatgtgtgaacttggacaagttttaaatttaatttaattttgtttaattttaagttatggggtacatgtgcacaatatgcaggtttgttacatgggtatatgtgtgccacagttcacctatcaacccatcacctaggtattaagcccagcatgcattagctatttttcctgatgctctctgctcgcacccccaacctcccccaacaggcaccagtgtgtgttggtcccctccctgcgtctatgtgttctcattgttcagctcccacttataagtgagaacatgtggtgtttggtttcctgttcctgggttagtttgttgaggataatgacttccacctccatccatgtccctgcaaaggacattatctcattactttttagggctgcataatattgcattgtgtatatgtaccacattttctttatccagtctatcattgatgggcatttgggttgattccatgtctttgctattgtgaatagtgctgcagtgaacatacaagtacgtgtatctttataatggaatgatatatattcctttgggtrtatacccagtaatgggattactgagtcaaatggtatttctggttctaaatctttgagaaatcgccacactgttttccacaatggttgaactaatttacattcccaccaactgggtaaaagcgttcctatttctctacaacctcgccagcatctgctgtttcttgaatttttaagaattgccattctgactgacatgagatggtatttggacaagtttttaatcattctaagtaaagttatgtttcctcgcctgtaaaatgggataatatagataatataatattgcaacctttataatattgtcaagagtgttgcgtgagataatatgtataaaagtgcttaacatagttcctgatgcatactaagtgaccagtaattcttagctattaaattatctatactgcttttaaggttttctcttaaattgtatctgttaagactttaaaatgttattatacttgcttattgcaaacttcgttacacactaaagatatttgtgtgattcaaatttaccacttgccaaagatgttgctttgaatgacttccgtgttccttccatcatgcttccttctccaagagacaccatgatcttatgagtttaagcactaactggcaggttgcatcatatgaagcatactgtcacttctggcatcgatttcctctgcaaatcagcgattcaagtgatctgagtttctccatcaaatggcttttaaataatgagcaatcatcatctgttaaccacttaggggccctcagggaaacttgaatgaagtattttgtactaaccataatgtatttggtatttaatagtcaaacataaaccctttttaaggtcactgtggttagagaagttggaagtgatttttatggcaaattaagtttccattgtttgaactcagttctgctgattgagaatgcaggctaggtggatttgcatttcactccttctctcctcccagctctagcagtggtttacctcctcactcatctcacctgggcagcaacaggattgccaaaacaaggaaaggataaaattctcccacttgagctctattaagcagaaagtaaaagaagcaattgagattatcttagtttcttcatactaaaggatttcctaccaggaatgaggcagataactgtaatcagtatgttctttaaatgtatagtcacattgtctgttgccttggcagaaatttgacaggtttgtaccatgagataatttttcacctatcacttccctctctcctttcacccctcccttcttttgtgtgtttttttaatagagattatctataaatttatgattagaaaaaaatgggactaagaaacatgtagggaccaactcttaaagacgctcaaacatagtcaaatatatttcttcaccatcaatcttttgctagctctttcacataaggctttttcatctgccgtctgcaggacattcagccttccctttgtcttcatgtctggttatctaagcaatttattagctcttccctaaggaactaccataaataacagaatctaaactctgcatcttctctttccctcaaataaagcattgtctttctccatctctctcactagtagatgaactaattgaagacaaggaatgtgtcttgtatattgctgcacctcctgcattttactcaaagcaagagctcaataactacttgttgaattattgaatatagataatataataatagaacctctataatgttatcaagagcattacatgagacaacacatataaaagtgcttagcacagttcctgatgcatactaactgtccagtaattcttagctattaaattatgtaaactgcttttaaggttttctcttaaattatatctgttaagactttaaaatgttattagacttgtttattgcaaacttccttacagactaaagatatttgtgtggttcaaatttaccatttgccaaagatgtttgcttcaaatgacttccatgttccttccgtcattcttccttctccaagagacaccatgatcttatttgaattgttgaatataaaagggacaattagggaatattgtttaggttgcagctaggaaagcttctgtgcttgatctgctgatctgggctagttttgcagatgccagttttgcttaatatggttaggacaattgccaaagagttagaactgttctaagatctgcttagaaaactttatcttctagtgtgctctgatatgaacctgcagaaaaaacctagacccctcctaacctcaaaggaacactgggttggtacagcttctcggacatcaacagtgccttctaggaacatatattctaagaaaatccattgcctattaagatacggagtggttgcccagtttcttttctaatgagtgcattctcttctctcttatgtttgctctcttgtgttaatataacaaaaagagcatttggtgtgtaactgctattgcatgagcacttcattttctttcaaataggtggatatgtgacttcctcactaatgactgtcacacggtataagagaaacccatcaccataaaatatagtattcttagaagactcttttgcatcgatgaaacccacttatgctgctgaaaatgtttttaacctgtcttcttctatgtgggaaatggatgtcattggtagggcatgcatgaactgaatagataaagcctaacttcatgctgtgtgcttataccacctgcagatctgcatgcatgcaggtatgtgactgaaggactcctccgcccaagccctgaaagacggtcctcccttacactaaagggaaggagacagaagatttcaaagtcagcgcctgtgtcatcttctcccttttcttctccacatttgtttctcagaggaatcttagtagatggagggagttcgttgtatttgcaacttggaggggtctcattttagttttcacataagggcaataagaagagataaggagagatgagagttataaagggcagccaatgtgaaagaagcttcccaaggcaaggtgatattgagttcaggtatgttttgaaccttgttgtgaggtatgttagcctgcaagcattacaaatcttagaaaatggcactagttaatccttcattatccagcagaaactgagccaacggccacgggtgacatctgtatctgattgttgaagagagagagggaatacttttgcctatattatgttgctcctgaactctgattgaacacaaaacaaggcagttgagtgatgcttgtatagtgccagtgtgaaaatgaagtacaaacgaagtgcccattaaaaaatgaagtgcatttctaatggattgcaagaatcacttaacactgtctgagactcctaaagaaaatcaagagattctgagactgaatgtactgaaatgtatcttgtgcctcgcaatttatcatggcactttttggtttcttttttaacattccatgtaaggcagaaaagaccatccttcttttgtatatcaaggtacagaacattccatcattgcaaggatggcccatgttacccttttataggcacactcacttccctcaaccccacctactcagcccctggcaatcactaatctgttctgtttctataatttcatcatttcaataatgatttcatcatttcaataatgtcatataaatggaatcatagagtatgtaattttggggggatttccctttttactcagcaaaattctccagagattcacccaggttgttgtagatatcgacagtttgttcttttttattgccaagcagtgttccatggtctggctgtaccagtttgcttaaccattcttttattaagggacatgtgagttgtttccactttttattacaaatagagctgctgtgagtgtctttgtaccagtttttgtgtaaacataagtttttatttctctgaaataaatgcgcaggagtacaattgctgggtcatatggtcattgtatgttttggtttttagaaaactgccatattatcttccagagttcctataccatattacacttctatcattgtatgagcaatccagcttgtccacatcctcaccagcatttggaggtgtcactttttttgagatggagtcttgttctgttgtccaggctggagtgcagtggcgcgatcttggctcaccacaacctccacctcccggattcaagtgattctcctgcctcagcctcctgagtagctgggattacaggcacacgccaccacccctgactagtttttgtatttttaatacagatggggtttcaccatattggccagactggtctcaaactcctgacctcgtgatccgcccgcgttggcctcctgaagtgctgggattataaggcatgagccactgtgcctggccggaggtgtcactatttttttaagccattctgatggatttgtagtgtgatatctcattgtggttttaacttgcctttcactaatggttaatgatgtgaaatatcttctcatgtacttatttgacatcttatattttctttggtaaaattttctggcatgtttttgctcatattctcattggatttcttgtttcaatactgttatatttgagagcttattatatattctagatacttgtcctttgttggaatgtaatttgcaaatacgttatctcagtctacagtttttgctttcatctacttcgcatgagctttcacagagcaagtttttaatttttgcagtaaccaacttattgtctttttacttgttttatggatcatgcttttggaggcaagtctaagaacctcttgccagtcctagatattgaagattatttcctatgtttctttctttctaaaagttttatggttttattgcatttaaattcatgagttaatttttgaatcaattttgtatgaggtgtgaaggttaagtcaggtatttttttgttttttgttttctctgtggatgtcctattgctccagcaccatttgttgaaaactatctttatgccactggagtgcttttataccttagtcaaaaaccacttgagcatttgtgtgattctattcttgggtcctctattctgttcccttaatctatatatcttttcctccacaaataccacccagtcttgattgctataactacatgataaaccttgaaatttggtagaataattccttccactttattctttttcaaaattattttaactattccagggcctatgttttccataaaaatttttaaataattctatcaatatctgcaaaaataaaattcttacttggattttgatggatgttgcattaaacctgtttaccaatttgaggggaattaacatatatattatcttaaaatctacaaacatatgtcttccatttaggtggatctttttttacttctttcatcagaaatgtgtaattttcagcatacaaattctaaatatgttttgttagatttacacttaagtatttaatattttgagcaattatatatagtaatgtatttttaattttggtgtcttcatatttattgttggtatagagaaatataatttttttatatttatcttaaatcctgcaacattgataaactcattagttagctataggaaaggtacttttatagattccttgggattttttaatgtagacagtcatgttatctgcaaatcgagacagctatattttttcctttttaatctgtaagcattttggtttcttttcttgtcttattgctgtaactggagcttccagcatgtgttgaataagagtgatgagatcagatacacttgtcttgttcctgttgttggggaaaaacattcagtttttcaccataaagtataacattagatacaggtttttggcagatgttttaaaatcacgtttagaaggttcctctccaattctatttttctgagcatttttaacatgaatcagtgttgaattttgccaaagtctttttatgtatcagtagatatgatcacatgacttttcttctttggcttgttaatatgatgaattactattgcgaaagtaccaggaatttgttttaatcagatacagtaagacaggcagacatggagtaactgctatgataagtttgttacactcacagatccctagaaacagggagcattccacactacagaatggagtcacatgggaaagccccgaggttagtcaggaggcagcggagtgagtagagaacttgggcaagagcctttattgtgattttcataggaaagaatgggtaaggctgggaatgaagtctcagcaagtttaggattgattggctagtctgaatcattttggtggacccttgtgggtaggtgttgttgctagttgtctagtaactgaccctggggtgattagggtaagggaatagtggcccagagcataggagcccaaaggaggtggttggaagtatgggtgctagattggtcagtttgcatatgaaaggggagctcccaggctagtcatttgttatctctgggaatcaactagttggggcagctcctccctggtccagaagacctcagatgtcaaagcattaaatatagaaactagaaaacatgattaatacaattacattgatttctataatataagttagccttgcatctctggaataaactcaatttgatcatagtgtctaattcttttttatatattgttgaagtctacatgctaatatttcattaagagttcttacatctgtattcatgaatgatattgatctataattttattgtttcattctgtttttatcttgtttgggtacataaggattgatataatttggatatttgtccactccaaattgatggaggcagagcctagtgggtcatgggggtggatccttcatgaactgcttggtcctcatggtaatgacttctcactctagttcctgggagatctgattcttataaagagcctagcacctccctcccctctctctctcacttcctgccatgtgatctctacatacctgctccccttcaccttcagccatgagtggaagctccctgaagccctcaccagaagcagatgctggcaccatgtttcttatgtagcttgcagaaccatcagccaaataaacctccttttttttataatttgtttgatctcaggtatttctagcaaaacagactaagacaaaggtaatactagcttcataaaccaactggaaagtgttaccttcacttctattttctgaaagagactctgtaaaattagtgttaattcttctgtaaaagttcagtggaatctcctagtaaaatcatttgagccagaacttttattcttggtagatttataaatcacacatttaattttcttaacagttatagggctattcaaattacctttcatattggagaagtagtttatattttatgagaaattgatctgtttcctctaagttgttaaatatgtgcatgtagagttctttatagtattcccggcttatccttttggtgtctgcagggtctatagtagtatgccctatttcattcctaatgttggtaatttgtgacttctttttttgttcccttgtcaaacttgctaatagtttgttaattttattgatcttttcaatgaatcagctctttgtttcatagattttattatttttctatttttaattttatcagtttctgctcttacctttattattttctttttatgcttactttggctttattttgctcttctctttccaagttcttggggtaggggcttagattattgattcaagacttttctgtttaataaagaaatatgtatttaatgctacaaatttccctgtcaacagtgccttagctgtgtcccacaaattttgatatgtcctatgtcttgatctgttttctgttgttataacaatatgcctgaaactgggtaatttataaagaaaaggcatgtatttcttaccattatggaggctgagaagtccaaagttgagaggttgtatctgttgagggccttcttgctggtggggactatgtaacatcccagagtggcatagggcagttcatgttgagtgggctgagcatggtagttcaaatctctcttcctcttcttagaaagccaccggtcctactcccttgataactcattaatccattggtctacaaatggttttattcattcatgagaacagagccctcatgacccaatcacttctcaatactgtccccacctctcggtactgccacattaaggagtaagtttcaacatgagtttcaagggagaaaaaaacattcaaaccatagtgctttactttcattttcattcagttccatgtattttaaaatttcttttgaaggttttttttttttttggcccatccatgggttatttagaactgtgttgtgtagtttccaagtgatcaaagattttcctcttatctattattgatttctagtttgattccattataaacagaataatctgtattatttcactggttttaaatttgttgaggtttgttttatgacttaggtattgtttatctttgtgtatgttctatgtgcacttgaaaaacaaagtatattcttctgttttggggtgaagtatcttataaatatcaattgacttctgctgattaatgatgttgagttcttctatatccttgctgattttctgtctaaaagattatcagttgttgagagagtgatattcaagtccccaacaataattgtggatttgtctatttctttttccagttctactagcttttgctttgcatatgttgcagcctatatatttatatttggagtgagtttcttatggacagcatatatagcagatcatgttttttaatttactatgctaatctcttttaattggtatacttagatcatttatatttaaattaattattgttatgttagagcttaagtatgccattctaatttttttttctatttgttctttctgttctgcctttctctattttgtctttcctgccttcttctgggttacttgtacttccttttcaaattgtttttatttatctatagtattattaaatatatcttttcatgtagtttttttagtgattgttctaggtattatgtcatgcattcataacttatagtcttttatgttgtcatttcaccagttcaagtgaagtatggaaaacttaccatccctttttcctcactaatttataatataattgtcttaaatatttcctcccctacatacatctttgaaccacatcagagtatcataatttttacttcaactatcaaagacaatttagaaaactcaagaggaaaagaaaaacccatagtacttacctatagttttcttactgtattcttccttcctgatgattcgaaaattctcttatcatttcctttctgtttgtggaaaggttattttataatttccttcctgtttaggagaactgagctatgcttttagaataaatctactggcaacaaatttgcttagttttccttaacctgagaatttcttgatttctcttgattcttgaagagcatttttactagaattctgggttgacagttcctttttttcagtacctgaaaaatattttacatcttcttctggcttccatggtgtctaatgagaaatctgttgttatttcatttgttttcctcaagagtcaatatattgtttttttttctgtataccttcaatattctgtcttgagctttcaaaaatataattatgatatgtcttggcatcaatttatttgagttcatactgtttggtattcactcagcttcttgaatctgtaggtttatgtttctttctaaattatggaagttttcagccattattttcttaagtacttttccagcctcgatctctctccttccttttaaggactccaatgacacaaattttagatttttttgttatagaccccaaaaaggaaggtttcttcattcatttagtctattttctctctgtagttcaggttaagtaattcctatttttttctatctttcagttcactgattctttcttctgtcacttcttttctgatgttcagcccatctgctaagctttttattggactttttaagttatttttcagtttgaaatttccagatgagccaggcacagtggctcatgcctgtaatcccaggaatttgggaggctgaggcaaaaggatcacttgaggccgggagtctgagaccagcctgggcaacatagtgagaccctctctctcaaaaaaaaaaaaaatccatatggttcttttttctattttatatttatttgctatcaattcctatttcctttctaaaactactttttcatctgcatcatacatgttcataattgctgttgaaacattgttcgtgatggctaaattaaaatctttgtcagataatgctaacacctctgtcatctggtgttgtcctctattgactgtcattttttatttaatttgagatctttctgattcttggtataaagagtgattttttaaaatctggacatttctgtattatgtcctgaaactctggatctaatgtaaaccttttgttttagctggcttttttttttgacaccactctggcagtgaaagtggggtgtgctgcctcatcattaccaagtagaggtagaagtccatgttcctcactcagcctctgttgacacccaagtagggagggcctcctcattactggtgggcaggagtgggagttctggctccccacatggtctccactgacactgtggtggtagtggtttcattaacactggacaatgattaaagtcttgactgtcaattagtccccttccaacaccatcagtggagaaagggaagggattctcattactgacaggtgggggaggaagtccagtttacccacatggtctccactgacactgccagtgtgaaatagggtctcattattggctaggaagaataaaagttctggctctctacttggccttctataacattactctggcagggatgttatgcatcttgttacagccttgctagggtgaagatcaggctgcccactcagactttgctagcatggttaggaagggaccacagttttttcctgtgatgtttgactggcatagagcagctactatctaaatattatctattttgctagactgcctgttactagtcatttcattaaagagcagccttttttttagttgctttttattgatttatttgttgtctgcaccagttggtttttccaggtactgccttcttctgtcccaagactttgatacatagagctaaataaaaggaattctgggaaactctctattgtgtccttccttgatctcagagtccctagctgatttgtcttcttctctccacctttgaagtcttcatatgtttattttatacacactatccaggtcttagttgtacttagccaaagaaataggggaatgtatgactacttcatctttgcacaaggaggaaattaataatcatattttatgagaaaatcttgaaatacacttgggaccttcagttaccactgtacatgcagaactccattgttgcagcagaagagtggctgtgagacccctcaagaggacacctttttgctagatcatggtattatgctctcatctcagaggctctatgggaagagtgatgtgttttaaatttgaaaacataaaacattagaagaagagaatgaagcagccttaaatggagtctaaaaattgagtaaagttgggctgcaccacctaactgagggtaaacttaccacaactcttcctttgctgtggcatttgagactatgaattaaatggaactttgaatcaaataataagttttttaaaaagcaaaaaaaacttatgcttatctaaggtttacaggcttcatttttttgagaggttgcaactttacataaaatgaaatcaccataaaatgatattgccataaaatgaaagctactaacctcagcagtgtaggatgtgagtagaactggttagagaaggcaagaaaggggataaaaatcacagagggccctggtcactaaagtacactttaaagaatatgccaactgttcktcatgtastagatactcataaatatgtgctgaattgaagacgtgcaagacgtgaactaattgttaaggcaagaattgaatacactaaacatatcattatataattgctgttttcagttgtccccactgccctgaagactctatatttgtatttttcaatgcattaagtgagacatactgtaggccatcaaaaatagttattacattcaattaaaaaatgatcacatttaaaaaggacagaaaaaaagagaagtgaaggtttggcagagtttgggtaattattactgctattcaccaatacttttggtccttttcttactggaaacatggtagattttactttctgatcccctggaagccaggcatgagtttgacctttaaaatacggcagatgaagcatgtcactttcggagmcagctttaagagcttaggtatgattcttccatgtggttttcctgggctatgtcaagcwgcactgctccagatggaggaggctgcatctctggctgcaggcaaatcaagcagggcaggacatttagtgtgagcaggaaattaatcaggaaagacaaaaatcaagcaagacatttaatgttaacaaagaatcaatctttactgtttaaaatgattaaaaaaaaagcaggggttatttgttactataacattacataacccatcctgaataatagaaaatagtaagagtgtgtctttggcagtaggattataggggctttttcttttcttttttcttatcttctcatattttgtattttttcaaataatgtttttatctattttttacttttgtagaatgtgtatagtttataataaggaaacaaaattaacttaaactggggggcagacacatttttatgatttgaatatgtttaaaatttaaaatgatgttatattttattgacaaaggtataaatgtacaggattaatgccattttcttgaacttagagtatgttggtgcatgatgctctttagtctccaagaacactgaaagacaaagtgttacactgtcattgaaccaaggcctatgatcttgagatacatctgctctagcccttaagaaatgctcttccaggagggcggtaggcctcttggggttctgggagacttttgtgtgactgacaacttcccttttgtctgcagttggcggatgtgatcaggcaagaggcaaccaataatgatgtgttgaccatgagaggggtgtgtttgctgattttcccttccctcaccttcccctctgtacaaaacacacacacasasagagagagagagagagagagagagagagagaacagagagtagcatggctgggctcattcaagaagacccagaacatctgcacattgcctttatcagacagaaggcctttcatgtgacttgtataggaagtacctgaataaaaatgattctgtttctattctggtgcaagctcagaacttctagacacagggttcacatgtgtttgtctgcacatattcactggatgacttgagtcagatcaatgaaagcccatgccttcaatctggcagaatcatcaaccagggataatatagagagtaattacagagtctcagcactgtaatttttctttcaacctcccctgacacaatcagaagatagtttttgatgtctttgatgattgaggcttcataaactaaaactaagaatgtctagatattttaaaaggttaatattttgcaactttgcctactgtcaagtattatttagagttccacttcagtaacctagaactatataacacaccatcaatagaaataaacctcttattggtcccattaaaaagatagtgaagccctggttttataaataaatgcttgtttcttattcttcttctgtcacccctcagaaccacatttagtatgtgaaataatgaattctacttctaaataagaagttaaaaggagccaaaagaagtgatgatagtgaatagcgcttattataaaggaaacactttcgggaatggtctctttttttaaggaaccaaaaaacttttagatcctaaactatacctggaggaaaaaagataaccttattaagaatctttacatttcttcaattagttttggaatagcaagttagtgtaaatgatctctctagccctacacttgttctgttaagtttttgaaaataaaagaaacaaaacaaaacatatatacatattctgaaggcaaaggccttttactgatattgtccagtttagccttcaaaatatttagcacctttctactctaaaatgtctaggtagaggaaaaaattatttttaaagtttttcaaatggcaacccttaagtgcagtttcatgtactcacactggaaactaggtcttggcatggaagatgcctggggatcctgtagactcaaagggctctgaaaaaaagttaataaccttttttccttgttactaaaaacgacccgggtgaggcatctcatatacccgcagggagcagctcgctgctgaaccatttcctccgccagccagactccctcggctttcatctcatcttgctaacatttttttttttattatactttaagttttagggtacatacaaagatgtttgtggcaatgaaattgatagcaaacttgackattcatacagcrtttagagattccttcttttttaattctattaactgagatgaacccaatctgctgaagccattcattgggagatctcgggacctggtcttataagactagctcagactttctggccatggtcccctgttctgtagatctaattagcaccgagagcagcttcctagcatctaaaacataagctgatctggattctaatgccctgatctggattctaaatttggaatcgtttttcttaaatgctcttacttcctattatttacgaaataggttgatctgcagaaaagggtgctcatattccctcaactagcggaatcagctagcccattaatcaacaagtatcttttccctaggatctactatgtgccccagggtgcactggagctagtactgcaatgtgtgaaaaagttgttataaccttgttagcatttggttgattccacagagctccatctcctaagagcctttgaaatccttttgcaactacttcctacacagccagcactcactcacccagaaagttcagttactgtcatgattaagccggtggagagggtgggagcgggagagtggaaatgaggataaagagagagatcttgtgctgagagcctgtaagccttcgttacctaacgcaatgaagaattcagattcccctcactcctcaggctgcatgagcttctgtgccaagtagaaggtcatgtaaytgtgatttgaaaaagacaggcctggaacccatgcacaattttaaagttatgcatggagtcaaagggagagaagggagacaaggggaataaagacayccttaacaaytaggaagtgagtgtgttttcttcctctcctcatcctgaagctagagcttctaccaggcaggaaaaacaggttgttctttggggcattggtcctgctggtccagtctaacaaggtgtgcttactaatcggtgtgcatttctctctttctgccccaggacagctttcctgcccgctttggaggagtccactttgtcaaccagccctggtacattcatgccctctacacactcatcaagccatttcttaaagacaagaccaggaaacgggtaatgaaaacaaatgcatcatgtaaattcctggtacaattttggtgcttctattttctctctcccctcctctctcctttcccccctttttctctctttctctctttatctttcactgtggtttttctacagcccctaagcatttaagcctcagctggagtttgcaaatggcctgggtttaattaataattcagtagaactgggttattttcggagtcccagtgacaaaccaaaagaaactttgaaggcatgcaaataccagatgcccatgttactgtaaattcttatgggagatactgggtccagcagctttcctgttcataaaatgttttagtagctagcattttgttctgcaaatgtattagtgctatraagaatgattacaatttttcttcctcccataactttgggtgataactgctaactgcatcacctgtaaagctggaaaagcattcttctttggaaataacactgctcttatgaggaaggcttttacagccttaattatatcaattgataacacttgggaagccagctttttccatcaatcagagttgggctttttcatggcattttgatgagctgagtaactgaacattccttaaccactctgaatctcaattttctcatttataaattgcggaatctaacacccacatcacagagttgttggggaaatctaatgagacagctaatgaaaacatgtatcatgatgcagttggtacatcatgagacttgttgacttttatttatctttaccatttagctctcttttctttttttcccagtgttattaaggtataattgacaactaaatattggatatatttaaggtgttcaatgtgatgtttttatatacctatgcattgtgaaatgattaccacaatcaagctattaacacatctatcacctcctataattatgatttgtgtgtgtgtgtgtgtgtgtgtgtgtgtgtggtgagaacacttaagatctactcagccaatttcaaataaacaatacaatattattacttattacagtatccatactgtacattaggtctccaaaatctattctcatyctatataactgaaactttgtcctctttttccagtgtctctccatttccccctactctcagctcctggcaaccacccttctattctatacttctatgatttcaacttatttagattccacatataagtgtgatcatgcagtatttgtttttctgtgtctggcttatttttgttaatataattgttctttaggttcatccacattgttgaaaatgacaggatttcattcttctttaagactgcatagtattcctctcggtatatatccatttatctgttaatggacacttaggttgtatccatatcttggctattatgaataatgctacagtcttatctttgagactttctattttcagctacctcctgggtcaggaacaccactccttatgggaacctggctagggtaatcctacaacaccttttcctgacacccagggtgcctgacactagggaatagctctgagtattcaggagggactgataatgtgagggattcccygccacctcccacactctgcagggtttctaactcctagatctcagatgcttccaggtcctttagagagcattgcaatggggtagagcaggggtaatttccctgttctcaaacaagtttgaaaccaggaattagaactcactgggatcacaagacagaaatgttttaaaacccatctggggctcaggacagtgctaagaacagagaagtgttctaggactgttctcaacatggcttcaggctttccagcaacttattcttctattcaggttggagcgagagagaattcctcccacggtggacacttgctgccatgccataggtgggcatttttggagctttgggcacaggatagattctaagaggtagagggtccagcctcctccttctgcattcctccattccacaagacccccagaagggaaggtcacctttaatggcactctttgtcyttcaaaaactggacatgttgggtggaggggtacaaatgttttctctaaacaccagggctgatatttcgctccagcatgtttcatatacaaaccctctgaaaagttttataaaagccagaaaagtgactttcttcaaaagaaataattcttattaaaattcagtcatactcaagtgcaatatcagaaattttgatattttgatatactttctgaagttctccagtagttttctgaagaattagcacttcttgtccccttcatctttaaatgatgtcattacatcatgagttaaaatcaatacaatagaacaaggtagcaagtgtttattattgaggtcctctatgtaagtattttaaaaatcacatataggctgggcgcggtggctcacgcctgtaatcccagcactttgggaggccgaggcatgcggatcacgaggtcaggagatcgagaccatcctggctatcacggtgaaaccccgtctgtactaaaaaatacaaaaaaattagctgggcgtggtggcaggtgcctgtaatcccagctactgaggaggctgaggcaggagaacggcatgaacctgggagggggagcttgcagtgagccgagattgcaccactgcactccagcttgggcgacagagcaagactccgtctcaaaaaaaaaaaaaaatacatatagattttttttttcccgagttggagtcttgttctgttgcccaggctggagtgcagtggcgtgatctcagcccactgcaacctccgcctcctgggttcaagtgattctccttctccagcctcctgagtagctgggattacaggcgtgccccaccatgcccagctaattttgtatttttagtagagacagggtttcaacatgttggccaggctggtctcgaactcctgacctcaggtgatctgccctcctcagcctctcaaagtgctgggattacaggcacaagccactgcacgtggcccacgtttatatttcatcatggttatactgtatgtatatgtgcatgcatgtgtgtatacctgatgatcctatacttgggtgcaccttatgtgttacacataattactttatgcctgcaacatgaagaagtgtgggaactgacatcagtacatggatggactttaagtcacctttcagagtcaactcctaaattgtagtcagtgctaattatctattcatgtctcatccactttgtagatttgtctggaaataattgtaacttggaggtgtgccttctctcctgcttgaccagtttttatcactatgtccccaatccagacaaaaatggaaaattgcagcaaaaatatctcacgataacttctcaggctgtggtttttgattccattaaataagaattgattttcttctaccttgtgcccacatcaccctaggagctaagaagcattttaaaggagtaagaaaacaccaactttttctctagatattttcccccgtggggaaacaagacgtaaatgaacatatcagaaaaacaaacaaacaaacaaaaacagaagtcggcagtcagcagatactgaagaattaattagagggtggttggaaagaagcagaataggcagttatcaccagggcgaattaggaagaagctgcaactttgtctaggccagggaaggggggaaggatctggaggactgggtgagagcacacagatgggagagmagagcagtctggagatccagcaatagctggggtttcaggtggtctgcaccatcactccttttaccagcagggataattaggagatgactgtatgtgtaaatttggcccacagccaagtaatgctcaatctgttcataaacttcatttttaatgactattaattcagccccttttctaagcaataaattaacattttatgaagactaagctacagtcacaaaatcaatgcctctttaaacactgtgatcaccagcagtgcatccaatttgtcatggctaaattgygtattagatgaaatctttggtcgtatgttttggattttgtattgctaattactttttgttttctttacagattttcctgcatggaaacaatttaaacagccttcaccagctaatacaccctgaatttttgccctctgaatttggaggaactcttcctccttatgacatgggaacttgggcccggacgttactcggtcccgactacagcgatgaaaatgactatactcacacatcctataatgcaatgcacgtgaagcatacgtcctcgaatctggagagagaatgctcacccaagctgatgaaaaggtaaggcctgggttatcagagccccccccccagtcagaggtcaatggaattttttatttggacctattgtgaattattaattaaagacctttatgggcagagaacttgaataaaataaattgcaatgcattctcagctgatttcactaaaactgaaaayaaatggggcttggctggcccagcactatagttgtccccattgtatcaaaggaatagttaaaggctaggacttcactcatgccacaattatagccctggtcttcagggtgtttgttaatacacacagaataaaatgttggacctttgagatacactaggtggaaaaacaacctgctaaaaaatgttcctatcattcatttatttggaaccatttattgagaatttactgggctgcagcactgattagggacaagaggtacaaatgagaataagatgtcaaaagaacagagaagtatgcctcagggaatcttccaagtaagacttttgcagcatatttataaagcaggcgacattcagtctgagctctggagaccagcaaccgaggcttgggaaatggcatatagcaatccaagcagagtggacagactgaggcatgtaggtattagagtgatggaataatctagtgtggtaaaaaggcgtgcaagggtgggagatgggactggacatgaaataaagctccaaaaacagttggatccaagtggtgaagaccattgcatactgtagtcaatggagtgccataaaagagggattaaaaagattgataaatgagtattttctcattataaaaattaaaacctgatttttaaaattttattttatttttccataagttattggggtacaggtggtattcagttacatgggtgagctctttagtggtgatttgtgagatcctggtgcacccgtcatccgagcagtatacactgcaccatatatgttgtcttttatccctcgcccccctcctactcttccccccaagtccccaaagtccattgtattcttacatctttgcatccttatagcttagctcaccyatcggtgagaacataagatgtgaaacctgattttttaagactaaaatccccttcagccactattctcaatctcagtctcaatcccatttcctcccaaatggtaaccactgtagaggtgggcccttgtaattctgttttccatacatcacatacatctatacacacccataaaaaacatctaatattgtataatttctagggctgctgtaataagttactacagactgggtggtttaaacaacagaaatttattttcttacagttctgaaggttggaagggcaagatcaaggtgttggcaaggttggtttctcctgaggcctctctccttggcttgcacatggctgccttctccatgcgtccttacacggttttccttctgtgtgtgtctgcctctatcctaacctccttttcttataaggacaccagtcgtattgaattatgacccacccatagaacctcgttttaccttaattgcttctttaaaagtcatatatccaaatatagtcatattctgaggtacttcaacatatgaacttggggatgaggaagacttcagcccatagcatattgttatgaaacgtttttccacgtcagtatatttagacatatgaagaggcttgaaaatatttgtggaaaaataagattaaagataaaaattcaaaatataaacttatatagctcaaggacatcagttcatatatgtgtgtatacatattaagtatatatacaaacaccttatttttcagcctaagttccatcaagttcaagacagttttgtgagtgacaataccagccatttagtttatccctaaataactgagggtcctaggaacttagccatgtcaatgtagtcttttttacattagatgaacaaaaatggatgcccttgaaatattactaagattagaaaacaaaaagaagtcagaaggagccaaatcaggactgaaaggtagttgcctaataatttcctattgaaactctcataaaattgcccatgtttgatgagagaagtgagcaggaacattgtcatggtgcagaaggactctctgggaaagatttcccaggaatttttcagctaaagctttggctaactttctcaaaacactctcatgataagcagatattgttgttctttggcccttcagaaagtcagcaagcaaaatgcttggaccagcccaaagaactgttgccaagacctttgctcttgactggcccacttttgctttgactagagcactgccacctcttggtaaccattgctttgcctgtgctttgatttcaggattgcactggtaaaaccgtttcatctcctattacagttcttcaaagaaatgcttcagaatcttgatcccacatgtttaaaatttccatcgaaagttctgctcttgtctgttcctgatttgagcacaatggttttggcacccaagtggaaagtttgctcaactttaatttttcagtcagaattgtgtaagctgaaccagttgaggtgtctgtggtgttggctattgtttgtgctgttagtggttggtccatgaacaagataaattagggcatgaacaagacaaattttttcctggcaaaatgatgtaaaattgacatgaattgatgtccacaactgagggcttcaccatcaacattgtcttgtcccttcctaaaatgagttatccaattggaaactgctgatttctttggggtattgtccccattaactttttgtaaagcatcagtgatttcacaatgtttttactcaaccttcaccataaatttgatgtttgttcttgcttcaattttagcagaactcatgttgctctgatagaggttcttgtcaaacctgatgtttctgatgtcttatcttcttagtgcctcaaactagattgtgttcagacatgctataacaagttagcacaagtttattttggtacaaaaattttttgaactccatgmataattttttataatatgcgttttccatgaactttgtgaagacccctcatagaccatgtgtttaatactgcatgccattttagaacatggatataccacagtttatccatctcctcattgctttgcatttgggtttttgaggttttccttttctaaacaagattcaataaatgtctttggtatacctccttcattttcttaggaaggttcctctgagtagactcagaaccctgtagttggtgggtatgtgcctttaaagttttagttcacactgttcaaaagccctccaaatgacaccaattgatactcccagctgtctatgagaaccttcttctccataccctggaaaaatgcttgatatgaccagactttaattttaatgataatcttatgatgggaaaacgccatgtcattttgttttcatctttatttcctcaacattcatagttaagcagagaaatgacataataagatctgggttttataaggatcatgggattagcgaggaaatggtttgtgcatcagagactaaaagccactagaaggctgatgcagagacttagttgggaagatgagagccagaactaatgccaaatcagaggaaaactggctctatcctatagatgtttggctatggaaaaggaggagtaacattcatgasggttgggctcaacttcttccaaagtcctgttaatgtggatattttgacctcctcccatgaatcttgaatgttctagaatggcatccagaatggtgaatcctttccaagaagttttcaatttactttgtccagatccatcagacaaatcactatctatggtagctatagtcttatgaaatgtttttgtttgtttgtttgttttgttttgttttgtttttttgagactggagtcttgctctgtcacacaggctggagtgcaatggcatgatctcatctcactgcaacctctgcctcccacgttcaagcaattctcatgcctcagcctcctgagctgaaatgtatttcttaagtaataagatgtgaaagtcatggactgcagaatggatgttgtgctgggcatgaaaacaaccttcacctccttgtacatatccaccagagctcttgggtaaccaggagcactgtcaataagcactaatattttgaaagggatctttttttctgagcagtaagtctcgtcagtagacttaaaatactckgtaaaccgtgctataaacagatatactgtcattcaagcttcattgttctatttatagtgcacagggagagtagatttaacataattcttaaaggtcctaggatgtttagaatggtaaatgagcattggcttcaacctaaagtcaccagctgcattagcgcctaacaagaaagtcagcctgtcctttgaggctttgaatccaggctttgactctcctctctagttatgaaagtcctagatggaagaagtctattcttccaatagaaggctgttttgtcattggaaatctgttgtttagtgtagccagcttcatcaatgatctttcctagatcttctggatagcttgcttcatcttctatatcatcacttgctgctttactttgcacttttatgttgtggagacagtttctttccttaagcctcatgaaccaacctctgctagcttccaatttttcttctacagcttcctcacctctctcaaccttcatgaaattgaagagagttaggatcttgctctgaattaggctttggcttaaggaaatgttgcggctggtttgatcatctattcagacctctaaaactttctccatatcagcaataaggttgttgcactttcttagcatttgtgtgttcaactgaagtagcacttttaatgctcctttgcattcacaacttggttaactgtttcatgcaagaggcctagctttcagactttctgagctttcagtgtrccttcctccccaagcttaatcatgtctagcttttggtttaaaatgagagacgtgcaactcttcctttcacttaaacacttagaagccattgtaaggttattaattaacctagttgcaatactgttgtgtctcaaggaatagcgaggcccaagaagaaggagaaaaatgagagaacatttgatctgtgaagcagtcagaaaacacacaccatttatcaattaagtatattgtcttataggagcacatttcacggtacccccaaaacaattacaatagtaacatcacaaatttttttatcacagatcaccatagcagatataagaataataaaaagtttgggccgggtgcagtggctcaagcctgtaatcctaccactttgggagaccgaggcaggagaattgtctgagctcgggagttcaagatcatcctgggcaacatggtgaaaccccgtatctactaaaaaaatacaaaaaaaaatyagccaggttttgcggtgggtgcctatagtcctagctactcaggaggctgaggtaggagaattgcttgaacctgggcgggtggaggttgtagcaatgagtcaagatcacgccactgactgcactactgcactccagcctgggcaacaaagcgagactctgtctcaaaaaaaaaaaaaaaaaatttgaaatattgtgagaataaccaaaatgtaatacagagacacaaagtgagtcatgctgttggaaaaatggtgccaatagacttgctgaatgcaacattaccacaagccttcaaggtgtacaaagtacaatatctgcaaagggcaatgacgtgaagcacagtaaaacaaagtatgcctatatgtgaatgaattaatattaatgtygaatgaatattattagctccaaaacccatccgtggtacacttgtctaattgcttcaaaacygattagttggctttcagatagaaagagccaattcctcccccaaccccctgtctttaacaaggctctcatggttcttgcttgtagaatctttcatccaggtaggaaagagaaaacgtgccccaaataactataatgtagaatgtgagaggcactacaaaggaggagcaagatgctgctacagcgttctgaggaagaatcactaattttgtccaggaagactctcagagaagcctccatgtggaaggtttggctgacccagggtttggaggagtattgcatttcattacatacgggagccaaaattcaagactagctagcaggagaagctagcaagtgtgcacacacttcattttccccaccatggccacaaggatgtcctgcccactgctgctgccctttgtgatgacttccttgaacgcttgtccggagatttcaggcagtggcaggatgggcagagactggagaggagggatcagccctgctgttggcgtatatctcctgtaaggcacctcactgatgaggaacagagcagccactattcactgtctttttgaccactcagaacccacatggatgtgcaaaaattgggaacagaattggaagagaccttacaggtcatctcttccagtctctcacctgacagagaggtctgttctccagcacagaacatcarccagcctccgcttgcaccgtcyagagacaggcaggcacctttctgggcagcgtgttccctgtggtgtggccttgttaaaaagcacttgcttattctgagtaagatgacataggtctgccctctgaacagcactgtaatctccagtaggttcacatcatctattttcataaccccgttacccgacccccatagttccctacatgcttcaggtccatttggattcaagtgggctttgtgcaccgaccttgggacccaatcacttttygtaatctggcttttgggcacagatggccactgtgttccaaagcactctcgacccatgctttctggtatccatgtagagtaaaagccaagactcccggaactctcagtgaatgactggttctaatgagctcttgttttttttctttggataattgtagctcaacccttatgtagaaaaaacaaaataatgattggtttagctggaaattcctctaaatgaattatttcaatattgttctgctctttaatacaataatgccatggtgggcttttgaggtgtgtggcattctctgctctggtactaaatgaccctgagttttatatttttaactttttattcctgttttttcttgttgttgttattgttgtttgrgacagagtctcgttctgttgccaggctggagagcagtggtatgatctcggctcactgcaatctccgcctcccgggttcaactgaccctcctgcctcagcctcccaagtagctgggactacaggyatgcaccaccacgcccagctaatttttttgtatttttaatrgagacagggtttcaccatgttgaccaggatggtctcgatctcttgactctcatgatccacctgccacagtctcccaaartgctgggattacaggcgtgagccaccatgcctggccttattccttattttattttatttttcagaagtccacttctttgctcccacatcatcagctgttttctgttcttaggagtgtatgtgtgaagcacctcactttctcctacctaatttactccttgaatatgttttaggcttggagaataggtaacccaacaytaaaactgtccaacaaagaatagtaaataagctttgtattagttatgattattttcactgcaagaaagaagaaaacccaaatgaactgctttaaactatgaggaaaatgcattatttcacaggagacatcttgaagacaggtgactgcaggagtgttattctagggactcagtaatggccacaagaaccaggttctctccactgtgtccagcacaactggagacttctcaggcaggggctgatttctgactctcacaggagatcataatgcctaaatgaaaggagttttgttggagaaaaaggaagaaagagtggcttagggctggaaaccaacagtcctgctacacacaggcttattcaggggtgtaggccggaaatttctgccaggaaatttctgcattattttttaatcagcatgtagagtttgtgacctttaattgttaggccatataaagcaattactttctggttcttgcctttattgctgataaagtaattaaaatggctatagatattattgttattttattattatttttttgagatggagttttgctcttgttgcccaggctggagtgcagtggcacgatctcagctcactgcaacctccacctcccgggttcaagtgattctgctgcctcagcctcccgagtagctgggattacaggtgcccaccaccacactcagctaattttttgtatttttagtagagatggggtttcaccatgctggccaagctggtctcgaactcctgatctcaggtgatccacctgcctcagcctcctaaagtgctgggattataggtgtgagccaccgcacctggcctatagatattatttaaaaggcacgtgtgcacacacagaaacactatcatgatgtaactactggtgaaggatgagccactttgagaggtcttcaaatatatgtatctgtatgtatacacacagatatacatgtacatatatatataattgttaaaagattactggtgataaacctcatgtaaattttgtcctgtgattttgattgagggtaagaaacttcagccattccctggagctgaatccatctaaatgcagattgatccaaaggtagagagttctggggacagtgctcattagatgcaacacgcagaaggataagtgatggcgggtgcccttgcagcaggttagatatcacaattgttctcagacgcgtcctttcatttgtttcatttattcttagccagtcctgacagcggctattaacaatggacctgatgatctcaaggaaacaaagagcatctttcccggtatttcttggcaaaaataaaaggggggactctgaaaagccaggctttgtcctgcctctgaacccatcaccatggccagggagagggtgcgtttgatttccaggaatgagaagtgtgttcattctggtggacaggcacgggtacaaatcctggacgaaacaggattattataggaaggggcagtggtttcccaaagaagaggtacggaccatatcgaaactgtatatccccaccatacaggaatggcaggtagttcctgccatggccagcagggggagaaagtggggattttaggctgtcctctcattgagcttgaatgggttcatcttggctgtaccacattgcagaagcctctgtttgcagggtaaacattctccacaaaaagtttatatagaatacattttattattcttcttattagcggcttttgaaagtttagatctggaggaagtccttagatgtcatytagggatcgtcagactttccaccactaaggacctcttctgtcccccacagggtatgtgtgtgcagtgaaagacgctggctaccgaaaacattgcatttgttaaataatcacaaattcagtgtaatcagtgttaattcacagaattatcctaagatactgaattttaataaacacaaacatattttagatttaatttaaattttaatctcagagagggtaaatgtgaaatttctataaagttttatggaatattaacaacaatgtaaaacaaaccttttgctcattactgcttatgtgaaatggctgggatgaaagctcaaggccccyaactttgagtcttggggatttttctgtgctgtttgcttttccaaaagcctagtgtcttgcacgtagcatatgttccttacatagctaatattttagtttaaaaaatataagtgtatggtgcatagatgtgtccttttcacagtggtactaagattttaaaaaatgtttgtttgttgtttctctcattatcatagctaaggtactgagaagttctacaaggaaaaaagctgcatcgccaaacatatcttgtcctaggattctttttgggtagaacagctgttagcatctcactgcacatttgtctctcagagactagagtatagaaaatgctactccagtgattgaaatggaaagttaggagcaatttaagttcatggaacctaactaagctgaatcttgactgacaatttttatcctctttgtttcctggaggcccctccctggtgcaaaatcatctgcatttcaacctgagctcagtctgatatcccagccatataagtaaaagtactaaaaaraaaaaaaaaaaaaaaaggtagttactatgtgctatttcagcctcattcagctcatggacttaccaaataaacattcatgtctcagcactgaaagagaaactcacagtctgatgacagtggagccaccgcttatcggaattccagaaactaccaggggcagaaaagcacatgttagcttcccttttgtggccagtgagctgaatggagcgataccacaccccacgaggtgctgccctctgcctgtgacacagcagcacagccacccaggccaaacagtctgaggaaaagcagaggtrragtgacctcgaagaatcatgcagargtcttctaatgtgggcagaatcccaggagagagcaatggccagcctatcctggccatgaccactcaacaaatatttactgagcattttctctgggctgagatcacaggctcctgtgtttcatggaatcaaaagaccagtgtcagcaaagcacctccatgcaaaaagtgacaatattacaccatctgtgcagatcacaaacataacattttagttattaattctgcgctgacttcctaaattggcatgacatatgccatagaagacctacttctgattcttatggccaaataccttcatccttatgttctgtaaatacccctcctagatccygcatggaagaattgagatgtcataatgacacggtgagccatctgatcttgggggtgggtggcaggctgagaatgcccggattaaattcaaatttctgagccagaaggaaattttaggccatgtttccccacttggcccctgcctgggtagtaaaagtcaccttaactgttttcagctgtcaatagaattagctgtgaccttggtgatctttgagcatgttgtcctctttttatagggtgaatttgtgcatttgctggataactactcatttccagcagaggtaatacatcatcatgaaataccatctatatgaaaagaataagggttggcagtgtgggaacaggaggaccgttgtcttctgagcagccagggcaaggagtctattttacttcatggcttgggaacagatgttccatatggctgttccattcaacaacactatataatgcatcatttcttaatgaatgatccgcagtctccactgtcctctaaattgcctttgtctgatgtccaaattaaatgtgattgaacttcttagttttggcgtctcactgctactcaagcagctaatgcctgagatgtatcatcacttctagaagcaaatacttctaaggtaagccataaattcccagtgtttaatgctggttattggatactggagtgttccacagatgccaataggaatttgttaacatttcttaaagattgaagaaaaatagctgcatagcctcaccattacttgtacatctggccgagatagatgtcctgcttacatacagctttcttttctgtggcataaatgaaaggaccatctccttacaagcacawcctgtacagctgtgtaacattggagtgaaagaaaatctatataatgaatttagttaataagagaatgaatggggctagttaaaatgttgggtacaggggcatgttttctcttaaagaatgatgtgaaaaattattagataaagagttctaagctactggcagacaaaagaaatagagttgaattagaaggaaatgaacggatgtgaataaactgcctggtgtagtttcaaaaatgaactgtttgattactcactgtgttatgttctgaaaaacatgcctgtttgctgaagcaccatgctcagatgcaattatttggaaagggagatatagcctaggcaagaatgacaaggaatatttatttcttgtgacatattgctgttggtagacaaccattctgcccaattccaattaagctgatgctgtttgtgcctaacatctagccagcaatgaatctgtcttaggagccgtaatgagcatatgaatgaaaacaaatatttgacataatatatggtagaagtctctctgcaatattttcttaaaaacactgtgcagcttgcataccatggttgaatttctttttaggtttaggcaaactttgttgtagatatcagctgagcttaagatgttcaaatggtggtattagagttttatatcaagcccataaatgagcattgcggagcttcgagcatttcattggaaactccttcacagccccacttagaacgcacctctcagggttcctgttgtcatggtgatcagcaccaacaagcgccctcactgtgcactgtggctgttcatgataggcctccagggctccacgtacacagcccagcatcctgatcttgctggcttgtttcagccttgtgactttgaggccatgattacactggtcttttcctttstatgtgtcttcattttcctatctggtcattttcttatactggttatttataataccttgggcaggccatgtaaccttgctgagtctcagcttccttgactacagagtggatgtaacatgtgcaagagctcccggcttgctgttagggtcagaaggcagcagagtgagaaagtcaactgcagagcaccacagaaaaacagcatgatggctattacctttctttccttcccagcgttgtgtaraaggcttgccattttgtcacggttttgatttctttccaaataaaagttttctcactaaaaatgaaaaatcctaactccctagtagagaagcaggtaatgattatgcatggtggcttgaaaggaggggccttgagttcctgattagaagtcagacttatactgcctctttccctcttctttgccttagtttttgcatagggtcaatacaaggcttttgtacccttggagccctgcacccagagcatggccaagcaygttgggagcgggycacagaaagcaaagccaagaagagggaggaattagcagcacagcacccctacctcccttcctcctggtcagccaagagggctttgtggttacaggagccctcattccccacttgccagtcccctcccagtctgagcctgccccctggcctggaggacaattacatttttgttgggtctttattagtgttgctccttttgctccagccctcaaatctaaactgttatccctgtggtcttgagtgtaatttttgaagtcataatgatgcttctccgcctaactccctccaaagccttcccctggcctcctgcaggcccctcccgggcacacacagcccccatcacactggcttccatccactccttctgcatcccagggcttgtacttgctccaggacagccctgctccagcatgctcctccccttgctcaagtcagctcctcattcattgggtgcagtttatacctccactcctctcaagggcgcttgtccccctccccatgcccctctcttcccatctgctagtctctatcactgaattctgtttctgtcttaacagggaccacaattctataattatgtatttattggtttacctatgtattatatctcctttctgaagatcatatgtttcccaagggtggggatgatgctcttttatttgccactgtgcctcacttattccctagtatataataggtgctcatgacatagtttctggagaggggagggaaggaaagaaggtaaaaaagacatggggggaggagaaggagggaaacaaaaaagagagaggaaggaaacaacaaaagaaggagagaagaaaggaaaaatcgtgtaacagtaaatgctgtgaggaacactctattttgtagagtgatgaggaagatatcatcaaccatccataaaggaataagacatggtctttgtaatcaatgtttcattagaatttgaaattgtctctaaggttatcagtaaccaactccttagtctcattacttctcccagtttttgaatttccattaacaattaacatttaaaataatttttaaaaattttattcattcattcaataatcattgagtatacattatacacaagtaggatagagggcaattaagagaacagaatcagtaatcagattttatgcgttcaaattaatagctgtgtgacctgagtagctacctctctgtggcctacttttcctctctagaaaggagataataatagatctaccttattattgtgctgtgaggattaaaggaagtcagtgcaggtgttatctgctgaagacagagtggttaacctggcggacactgcccctgcagtgtctctgagtctgtggtctatgaagggggacagactttaaacacattacccatacaaacagctgtttcatggtcaccataagtgctttgaaaagttaaagtgtaccatgaggatacaggtgtgtaacgaggaggatcctaacctagtcttgggtggaattctggaagcactttcctgaggaagtcacatataagctgaaaactggaatatgagaaaagtaccccaagcaaaaagggaggcatgggggtgggattcagagcaaacaccctgcatttggaaggaccagtgtcaggaactactgtgttttactgattaattataagatgcattttccatcacattaaaaatccctgaaatgaagacatgtcctacaattgatgacatctgaaattcacggaatttaaaaaaaaaaaaaaaaaaaaaagaccagaaacattggagagcagaaagcgagggggaaaatgacgggggtgatgcacaggggcccaccgtgcagagctgcatagggcagatatgaatatcggactttgtcctataagcaatggacagtttcagaaaagtttttgcaaatgagtgcaatgaatagataagtttattaaaattttcactctgttgtgaggagaacaaattggaggtggagagagtagtaaaagaaggctgtatgagactacagtaatggtgcatgtaggagatcattgtagcctggattggagtgctgagcgtggaggtacagagaagaagatgactcaaaaatgtttagtgaatagaataaacaagatctgatgatcaagtggatattgggatgaaggtaagatgcttcaggaatgaccagaggtcttttgcatatgtaaaagatgcaatgctgctgaatggaaagcagacccttttcccaagataaggaactctggaagcagtgctgactggggagatgattgtgaattcagtgttggacatgattaatgagagggcttgtgtggtatctggttagagtagtcatgtaggctgtttagaacatgtwtctcctgttctaaagctcaggaraaaattctggagtgggaaaaatcaggaactcaaaggcataaagaggcaaatgcaagccatgggaatggaggagaactctcagagagagcttgtagaaagaaaagaagaatgagtgcctaggtttgagctgagaggaagttcagtatttgaatgtcatacagcgcaaracaccattctccaacayggagaatggtaggaggtaaactagatgkggtgttgcagaagccaaaggaacagaaaggatttcaggaagggtggagtcatcaactctatttactgcttctgagaagccaagtaaggtgaagatttaaaggtatccattggacataatgacttgaaagtcataggaagccttcacaagagctgtggtggagtcacatgggtggttatgaagatgcagcgggctcagaagtaggtaggatgtgagcagagggagagatggggaagatatttgtatctggagaggcatgtaaagatccagaaggcttttttgttgtttttctattttcttctattttctgactttgtcttcctcttcatcttcttcttcttttgttgaaaatgggaacactaggatatctcaatgctaatagcaaagatccagtaaagagggagaattggaaggtgtaggagagggaacaattgataacaccaagcaggtgagattggttaggaccccgagcctgagtggaggaagttgttgcttttctaagagcaagaagctctctttacagtaatcaggcacctgtgcatgtggcaccccaaagctgagaagttcccgaggactctattttcccagtgaagcagggcaagtctttttttttatatatatactttaagttttawcgtacatatgcacaacgtgcaggtttgttacatatgtatacatgtgccatgttggtgtgctgcacccgttaactcgtcatttagcattaggtatatctcctaatgctatccctccccactgccctcaccccacaacaggccccagtgtgtgatgttccccttcctgtgtccatgtgttctcattgttcaattcccacctatgagtgagaacatgcrgggtttggttttttgtccttgtgatactttgctgagaatgatggtttccagcttcatccatgtccctacaaaggacatgaactcatcattttttatggctgcatagtattccatggtgtatatgtgccacattttcttaatccagtctatcattgctggacatttgggttggttccaagtctttgctattgtgaatagtgccgcaataaacatgcgtgtgcatgtgtctttatagcagcatgatttatatactttgggtatatacccagtaatgggatggctgggtcaaatggtatttctagttctagatccctgaggaatcgccacaccagcttccacaatggttgaactagtttasagtcccaccaacagtgtaaaagtcttcctatttctccacaccctctccagcacctgttgtttcctgactttttaatgatcgccattctaactggtgtgagatggtatctcattgtggttttgatttacatttctctgacagtcagtgatgatgagcattttttcatgtgttttttggctgcataaatgtcttcttttgagaagtgtctgttcatatcctttgtccactttttgatggggttgtttgtttttttcttgtaaatttgtttgagttcattgtagattctggatattagccctttgtcagatgagtaggttgcaaaacttttctcccattctgtaggttgcctgttcactctgatggtagtttcttttgctgtgcagaagctctttagtttaattagataccatttgtcaattttgtcttttgttgccattgcttttggtgttttagtcaagaagtccttgcccatgtgtatgtcctgaatagtattgcctaggttttcttctagggtttttatggttttaggtctaccatttaagtctttaatccatcttgaattaatttttgtataaggtgtaaggaagggatccagtttcagctttctacatatggctagccagttttcccagcaccatttattaaatagggaatcttttccccattgcttgtttttctcaggtttgtcaaagatcagatagttgtagatatgtgacattatttctgagggctctgttctgttccattgatctatatctctgttttggtaccaggaccatgctgatttggttactgtagccttgtagcatagtttgaagtcaggtagcgtgatgcctccaactttgttcttttggcttaggattgacttggcaatgtgggctctttttgggttccatatgaactttaaagtagttttttccaattctgtgaagaaagtcattggtagcttgatggggatggcgttgaatctgtaaattaccttgggcagtatggccattttcatgatattgattcttcctacccatgagcatggaatgttcttccatttgtttgtatcctcttttatttcattgagcagtggtttgtagttctccttgaataagtccttcacatcccttgtaagttggattcctaggtattttattctctttgaagcaattgtgaatgggagttcactcatgatttggctctctgtttgtctattattggtatataagaatgcttgtgatttttgcacattgactttgtatcctgagactttgctgaagttgcttatcaacttaaggagattttgggctgagacgatggggttttctagatatacaatcatgtcatctgcaaacagggacaatttgacttcttcttttcctaattgaataccctttattttcttctcctgcctgattgccctggccagaacctccaacactatgttgaataggagtggtgggagacggcatccctgtcttgtgccagttttcaaagggaatgcttccagtttttgtccattgagtatgatattggctgtgggtgtgtcatagatagctcttattattttgagatacatcccatcaatacctaatttattgagagtttctagcatgaaggttgttgaattttatcaaaggccttttctgcatctattgagataatcatgtggtttttgtctttggttctgtttatatgatggattacgtttattgatttttgtatgttgaaccagccttgcatcccacggatgaagcacacttgatcatggtggataagctttttgatgtgctgctggattcggttttccagtattttattgaggacttttgcaacgatgttcatcaaggatattggtctaaaattctctttttttttgttgtgtctctgccaggctttggtatcaggatgatgttggcttcataaaatgagttagggaggattccttcttttcctattgattggaatagtttcagaaggaatggtaccagctcctccttgtacctctggtagaattgacctgtgaatccatctggtcctggacttcttttggttgctatgctattaattattgcctcaattcagagcctgttattggtctatacagagattcaacttcttcctggtttagtcttgggagggtgtatgtgtccagaaatttatccatttcttctagattttctagtttatttgcatagaggtgtttatagtattctctgatggtagtttgtatttctgtgggatcagtggtgatatcccctttgtcattttttattgtgtctatttgattcttctctcttttcttctttattagtcttgctagtggtctatcaattttgtcgatcttttcaaaaaaccagctcctggattcattgattttttgaagggttttttgtgtctctatgtccttcatttctgctctgatcttagttatttcttgccttctgctagcttttgaatgtgttagctcttgcttctctagttcttttaattgtgatgttagggtgtcaattttagatcttttctgctttcttttgtgggcatttagtgctataaatttccctctacacactgctttgaatgtgtccctctacacactgctttgaatgagattctggtgtgttatgtctttgttctcaytggtttcaaagaacatctttacttctgccttcatttcrttatgtaccctgcagtcattcaggagcaggtttttcagtttccatgtagttgagcggttttgagtgagtttcttaatcctgagttctagtttgattgcactgtggtctgagagacagtttgttataatttctgttcttttacatttgctgaggagtgctgtacttccaactatgtggtcaattttggaataggtgtggtgtggtgctgagaagaatgtatattctgttgatttggggtggagagttctgtagatgtctattaggtccacttggttcagagctgagttcaattcctggatatccttgttaactttctgtcttgatgatctgtctaatgttgacagtggggtgttgaagtctcccattattattgtgtgggagtctaagtctctttgtaggtctctaaggacttgctttatgaatctgggtgctcctgtattgggtacatatatatttaggatagttagttcttcttgttgaattgatccctttaccattatgtaatggccttctatgtctcttttgatctttgttggtttaaagtctgttttatcagagactaggattgcaacccctgcctttttttgttttccatttgcttagtagatcttcctccagccctttattttgagcctatgtttgtctctgcatgtgagatgggtctcctraatacagcacactgataggtcttgactctttatccaatttgccagtctgtgtcttttaattggagcatttagcccatttacatttaaggttaatattgttatgtgtgaatttgatcctgtcattgaaattctgggttgaaaattctttcctttaagaatgttgaatattggcccccactctcttctggcttgtatagtttctgccaagagatccgctgttagtctgatgggcttccctttgtgggtaacccaacctttctctctggctgcccttaacattttttccttcatttcaactttggtgaatctgacaattatgtgtctttgagttgctmttctcgtggagtatctttgtggcattctctctatttcctgaatttgaacgttggcctgcctcgctatattgcagaagttctcctggataatattctgaagagtgttttccaacttggttccattctctccrtcactttcaggtacaccaatcagatgtagatttggtcttttcacatagtcccatacttcttggaggctttgttcatttctttttttattcttttttctctaaacttctcttcttgcttcatttcattcatttcatttttcatcgctgataccctttcttccagttgatcgcatcagctactgaggcttgtgcattcatcacatagttctcgtgccttggttttcagctccatcaggtcctttaaggacttctctgcataggtcattctagttagccattcgtctaatttttttttcaaggtttttaacttctttgccattggttctaacttcctcctttagctcggagtagttgatcttctgaagccttcttctctcaactcgtcaaagtcattctccatccagctttgttccgttgctggtgaggagctgcattcctttggaggaggagaggtgctgtgatttttagagtttccggtttttctgctctgttttttccccatctttgtggttttatctacctttggtttttgatgtcggtgatgtacagataggtttttggtgtggatgtcctttctgtttgttagttttccttctaacagtcaggaccctcagctgcaggtctgttggagtttgctggaagtccactccagaccctgtttgcctgggtatcagcagcggtggctgcagaacagcggatattggtgaaccgcaaatgctgctgcctgatcattccyctggaagttttgtctcagaggagtacccggccgtgtgacgtgtcagtcctcccctactggagggtgcctccccgttaggctactcaggggtcagggacccatttgaggaggcagtctgcccgttctcagatctcaagctgtgtgctgggagaaccactactctcttcaaagctgtcagacggggacatttgagtctgcagaggttattgctgccttttgtttgtctgtgccctgcccccagaggtggagcctacagaggcaggcaggcctccttgagctgtggtgggctccacccagttcgagcttcccggctgctttgtttacctactcaagccttgttaatggcaggcacccctcccccagcctcgctgccgccttgcagtttgatctcagactgctgtgctagcaatgagcaaggctccgtgggcgtaggatgctccgagccaggtgcaggatataatctcttggtgtgccgtttgttaagcccattggaaaagcgcagtattagggtgggagtgacctgattttcctggtgccgtctgtcacccctttctttgactaggaaagggaattccttgaccccttgcacttcccaggtgaggtgatgcctcaccctgctttggctcatgcatggtgtgctgcacccactgtcctgcacccactgtccggcactccccrgtgagatgaacccggtacctcagttggtaatgcagaaatcacccatcttctgcgtcgcttctgctgggagctgtagactggagctgttcctrttcatccatcttggctccaccctcagggcaagtcttaagagtgagattagactagggtacagaagggtttttaggtaagatgatacagacgtgcatgggcttgaaattgccttgggggaaacattgaacgtggaatgctgttttaagtgttggtaggaggggtaataatgagtttacagtgacctctctattcttgggtagtgtgatccgcacttctcagctgctctgaagctgacatggaagaggaatattgttggagtcatccagagctgggatttgattaaaggagctcagtgtatggccaagagaaagactgaagtgcctgattatgcattcttggtttagaggaaaggaaaggaaactaggacaggcttcacacataaggggwcataggtgttgttgacctgtgagggctgagtaaggaggtagacacattaccagttactgactaatatgagctaatggaaaatgtgcagctgtccatctccctgagccctagctctgcaatttggtgtataaaaaataaaatagggggaggttccaagatggctaaatatgagcagctccagtctgcagctcccagtgtgagcgacgcagaagatgggtgawttctgcatttccaactgaagtactaggttcatctcactggggcttgtcagacagtgggtgcagcccacagagtagagtggggcatcacctcacccaggaagcrcaaggggtcagaggattccctttcccagcaaagggaagacgtgacagatcgtacctggaaaatctggaaactcctaccctaatactacgcttttccaacggccttagcaaatggcacaccaggagattatattccatgcctggcttggagggtcccacacccacagagcctcactcactgctagcacagcagtctgagatcaaactgcaaggtggcagcgaggctgggagaggggcgtctgtcattgctgaggcttgagtasgtaaacaaagaggctgggaagctctaactgggtggagcccaccgcagctcaaggaagcctgcctccctctgtagattccacctctgggggcagggtatagctgaataaaatgcagcagaaacttctgcagacttaaatgtccctgtctgacagctttgaagagaggagtggttctcccagcatggagttggagatctgagagtggacagtctgcctcctcaagtgggtccctgacccctgagtagtctaactgggagacatctcccagtaggggccgactgacacctcatacagctrggtgcccctctgagacgaagcttccagaggaaggatcaggcagcaacatctgctgttctgcaatatttgctattgtgcagcctccactggtaatacccagacaaacagggtctggagtggacctccagcaaactccaacagatctgcagctgagggtcctgactgttagaaggaaaactaacaaacagaaaggacatccacaccaaaaccccatctgtacgtcaccaacatcaaagaccaaaggtaggtaaaaccacaaagatagggagaaaccagagcagaaaagaggaaaattctaaaaatcagagtgcctcttctcctccaaaggaatgcagctcctcaccagcaatggaacaaagctggatggagaatgactttgatgagttgagagaagaaggcttcagataatccgtaataacaaacttctccgagctaaaggaggatgttcgaacccattgcaaagaagctaaaaaccttgaaaaaagattagacgaatggctaactagaataaacagtgtagagaagtccttaaatgacctaatggagctgaaaaccatggcacaagaactacacgacacatgcacaagcttcagtagctgatttgatcaactggaagaaagggtattagtgattgaagatcaaatgaatgaaatgaagtgagaagagaaatttagagaagaaagaataaaaagaaatgaacaaagcctccaagaagtatgggactatgtgaaaagaccaaatctagaaattataacaaactgtctctcagaccacagtgcaatcaaactagaactcaggattaagaaactcactcaaagccactcaattacatggaaactgaggaacctgctcctaaatgactactgggtatataacgaaatgaaggcagaaataaagatgttctttgaaaccaatgagaacaaagacacaacataccagaatctctgggacacatttaaagcagtgtgtagagggaaatttatagcactaaatgcccacaagagaaagcaggaaagatctaaaattgacatcctaacatcacaattaaaagaactagagaagcaagagcaaacacattcaaaagctagcagaaggcaagaaataactaagatcagagcagaactgaaggcgatagagacacaaaagatccttcaaaaaatcaatgaatccaggagctggttttttgaaaagatcaacaaaattgatagaccactagcaagactaataaagaagaaaagagagaagaatcaaatagatggaataaaaaatgacaaagaggatatcaccaccaatcccacagaaatacaaattaccatcagagaatactataaacacctctacacaattaaactagaaaatctagaagaaatggataaatttctggacacatacaccctcctgaggctaaaccaggaagaagttgaatccctgaatacaccaataataggttctgaaattgatgcaataattaatagcctaccaaccaaaaaaagtccaggaccagacggattcacagctgaattctaccagaggtacaaagaggagctggtaccactccttctgaaactattccaatcaatagaaacagagggaatatttcctctccctaacacattttatgaagccaacatcatcctgataccaaagcctggcagagacacaacaaaaaaagagaattttagaccaatatccttgatgaacattgatgcaaaaatcctcaataaaatactggcaaactgaatccagcagcacatcaaagagcttatccaccatgatcaagtgtgcttcatccctgggatgcaaggctggttcaacatatgcaaatcaataaacgtaatccatcatataaacagaaccaaagacaaaaaccacatgattatctcaatagatgcagaaaaggctccgacaaaattcaacaaccttcatgctgaaaactctcaataaattaggtattgatgggagtatctcaaaatawgagctatttatgaaaaacccacagccaayatcatactgaatggacaagaactggaagcattccctttgaaaactggcacaagacagggatgccctctctcaccactcctattcaacctactgttggaagttctggccagagcaatcaggcaagagaaagaaatatagggtattaaattaggaaaagaggaagtcaaattgttcctgtttgcacatgacatgattttatatttagaaaaccccatcatctcagccctaaatctccttaagttgataagcaacttcagcaaagtctcaggatacaaaatcaacatgcaaaaatcacaagcattcctgtacaccaataacagacaaacagagagccaaatcatgagtgaactcccattcacaattgcttcaaagagaataaaatacctaggaatccaacttacaagggatgtgaaggactttttcaagragaactacaaaccactgctcaatgaaataaaagaggatacaaacaaatggaggaacattccatgctcatgggtaggaagaatcaatatcatgaaaatggccatactgcccaaggtaatttacagattcaacgccatccccatcaagctaccaatgactttcttcacagaattggaaaaaactactttaaagttcatatggaaccaaaaaagagaccacattgccaagacaatcctaacccaaaagaacaaagctggaggcatcacgctacctgacttcaaactatactacaaggctacagtaaccaaaacagcatggtactggtaccaaaacagagatatagaccaatggaacagaacagagcccttggaaataataccacacatctacaaccacctgatctttgacaaacctgacaaaaacaagcaatggggaaaggattccctatttaataaatggtgctgggaaaactggctagccatatgtagaaagctgaaactggatcccttccttacaccttatacaaaaattaattcaagatggattaaagacttaaatggtagacctaaaaccataaaaaccctagaagaaaacctaggcattaccattcaggacataggcatgggcaaggacttcttgactaaaacaccaaaagcaatggcaacaaaagccaaaattgacaaatggtatctaattaaactaaagagcttctgcacagcaaaagaaactaccatcagagtgaacaggcaacccacaaaatgggagaaaattttcgcaacctactcatctgacaaaaggctaatatccagaatctacaatgaactcaaacaaatttacaagaaaaaaacaaacaaccccatcaaaaagtggacaaaggatatgaacagacacttctcaaaagaagacatttatgcagtcaacagacacatgaaaaaatgctcatcatcactggccatcagagaaatgcaaatcaaaaccacaatgagataccatctcacaccagttagaatggcgatcattaaaaagtcaggaaacaacaggtgctagaaaggatgtggagaaataggaatgcttttacactgttggtgggactgtgaactagttcaaccattgtggaaggcagtgtggcgattctttgatgatctagaactggaaataccatttgacccagccatcccattactgggaatatacccaaaggattataaatcatactgctataaagacacatgcacacgtatgtttattgcagcactattcacaatagcaaagacttagaaccaatccaaatgtccaccaatgatagattggatkaagaaaatgtggcacatatacaccatggaatactatgcagccataaaaaatgatgagttcatgtcctttgtagggacatggatgaagctagaaaccatcattctgagcaaactattgcaaggacagaaaaccaaacmccacatgttctcactcataggtgggaattaaacaatgagaacacttggacatgggtggtggggaacatcacacactggggcctttcgtggggtgggggcagtggggagggatagcattaggagatatacctaatgtaaatgacgagttaatgggtgctgcataccaacatggcacatgtatacatatgtaactaacctgcacgttgtgcacatgtaccytacaacttaaagtataattaaaataaataaataaataaataaataaataaataaataaaataaatgggagagtgatgcctccagtggggtcagagggaatgggaacaagaacacagacaaggagctcagctttgaaagaggtactcaatgggacaggtggcatgtttgctttttgcttagttttttttctcatgccttgytcagagtcaggccaaaaataaatgtccagtacggattctattaatgaagaataaatgaaggaattaatgggcaaagagggacaatgttagtagaactattcttacaagaactcatctagttagtctttggtgtttgactaaaatcatagttcaggctactgacctggaggtattactgtaaaatctgacttttacgttattttgaaattaacctttaatttgaaccaatgtaaaacaatgattcaaactgaatctcartaatccttcacgtaccttaaactgtggatagaatacatmtttgcagttgaataatgaagtgtagtgttgaaaatggaggagttgaggaggtaagtgtggatcaatagcagaaaggaagcrttgaattcttgctccaggtgaaagaatgaggaggaataactggtcctgctacaggtgcatcacattgctggagactcctcttggtggaggtacatcctcactaaagtatcatcacccctttccctgccaccctgattcatttgcacttaccctttccaaaatttcctgtttgcctatgtgttcattgtctctatcagcccccaccaactgtgtatgctgaggcttatctgattagtgcagtcctgtggcccagcacctaaactaatgcctggtgctaataagggattgagaaatatttgttgatttgattaagatactattccaattcacttggagtgtttcctacctatgtgtgagttgttgctagctctagagcaaagctttgaaaattttaatgagcatacaaagcaccgagatcttgttaaaatacagattctgatttagtagatctgggctgggtctgagaatctgcatttctaaccagctcccaggctctgcccctgctgagggcccagggaccacagtatgagtggcaaggccctagagtgtagtcgtttcccacatttcagactgcaatatggatgttccctggacttgttctgggggttcttgaaaactgagccattcaagttttgagaatttaaataaaaaatatagatttaaaaaatatatttaaactagataagaatagataggttattatccacattttatagatgaagtggctgaggcacagagcagttaaataacttacctcagatcacagagctagtaggtggcaaaatattttaaattcagttatttttattctaagtaaaatgctgtctcctacatcgtgttctcacactatttgtgtattcactcattcattcttcagtggtttatagagtatcttttttggggattcacttttgcttaaactactattttggatgtatgttctcattcstggcagcccaaattccatcctgtctttaagacagttgaaaagcaarttcctccatcacaattttcrtgcactgcactgttccccaaaccccatccctagtggggaggatacagatatacaagaagaaaatttatatttaggctaatctggcaatgccaaagaagatccactaatatactgtcatttgactaaaaaaacataattatgaaacctactttttaccggtaacactagccatccttttcaaactcatcctgcagagggaatgagtcatcaacatttcgtcagccattgccaacttctggcatttytctacctgcttcagaacaccacagtttgttctaccaaagtaactgcactgagcatgtgcaccccagctttagagggagtatgataattagggatgctgtgaaactgactggcagctctttgtgccagtctaattctaatggaagatgactgttcaaagcgggtggtgtaagcacctgtagtcattttctgttatgattggtagtagwaaaaaagcttccagaaatatccacgtgattgaaatgcatggatttaacactccttctgaccatctcagaacacctgaacccacaccaaaaacgtatgtagtagcgcattccactcctcaaaagtcaataaacctatacgcatagaattttgaaactctaaggcttctatacatctcatgctgatacctggggttcctgtaaaggatttgggcacaacgcaagctagttatgaccttgaatgctctcacacttcaagctatgagggtgactctgtttaacggaatttttttgttgaattgctcagtaaaattaagaataactttataatataaataatccactgctccatatctattttctcagtcttttgtattttccttgattttcttcaagtgggtaaatatggctatctctgttatcagatatggcagagtatcaatagtttatgctcagaaatatgatactctaggaagtgttgtaaaatgataaacacttctaatttaaataatttctccttcaaagagctccaagcactttattgtatcttttatctttcatggccctgtggagaatatggcaatcatttatcctcattttacagatgaaaaactgagatgagttagctaatatggcaggaatgcatagtttcataaagagcaataagcccttttgtaggtaaattaagcagagtgtccagctgcggctgccagtttccacggtggccttccctggctcccttctcccattccttcctccccatctgcaagttccaggatgggtgtgtcttctggcagctgaactgtgttctcagttaagtctaatccactccctttctctactctcatcaatgttcagtgttgatggattgcagttctttatagatgctgccagatatttgggtgaatgcagtacatttagaagacaggatcttgaagtattattaaataataccctgctggtgattagggataaagtacgattctataacctatacattcttagaaaacttttttctcaataatgatctattttttatttcatttgctgcgcctaaaacaaacattttataaattaacagctgattaatgtaaactattggattcattaacatcaatgagagaaatggttctrtgagaacttcaatattaacatttactaatgtgaatatgcatgtttatgccctttggtttcttaccaagttataggtattttttgtacagtatagcacaagagatagtgcttaagaatgtggactgtagaatcagatctgggttcccgttctagttccacaacttactgtggaatcttgcacatattcattaccttcttggaggctcagtttcctgatttgcaaaatggaattaacaatacccagcttagattattgtgaagatttatttattgattgattgatttgtttttattttttacactacaaccatgacagatgaagattgtcgtgaagattaaataaagataatgcgacgaaatacttagtgcagaacctggcatgtagtaagtgttcaacaaatggttgttgatgatgatgatgaagaacagctgtggagatacgaaacactcctgtagatatttcttaaaacatccaaataaagtgtatattgaaatcatcttttccaaaatggtatcagactgatttcgatatgtcaaacaagggttactgagtgctgcttagaattgtggtgcacatctggaatatgcttggtgattacaattcagacttaaaagagcttggtaggagctactctctgcagcaggaaattgcaacctgagggcagactacttgtagcaatacaatactttaaagaaactaaaacgtttttaacaaggacacaggcaaatggctattaagtagcacgtggcagctctcaatttaacgtttagaaatttatggaagtcaggctgggcacagtggctcacacctgtaatcccagcactttgggaggccaaggtgggtggatcacttgagatygggagttcaagactagcctggccaacatggtgaaaccccatctctactaaaaataaaaaattacctggatgtggtggtgcactcctgtagtcccagctactcggttggytgaggcaggagaatgctttgatgctttgaacctgagaggcagaggttgcagtgagccaagattgcgccactgcactccatcctgggcaacaaaagcaaaactccgtctcaaaaaaaaaaaaaagaaggaaagaaatttatggaaatgaaaaacatttataaaaggtaaattgggccgggctctgtggctcacgcctgtaatctcagcactttgggaggctgaggcctgtgcatcaccaggtcaagagattgagaccatcctggccaacacggtgaaaccccatctctactaaaaatacaaaaaattagctgagcgtggtagcgcatgcctgtagtcccagctactcgggaagctgaggcaggagaatccaggggcggagactgcagtgagccgagatcacaccactgcactccagcctgggtgacagagcgagatccgtctcaaaaaaaaaaaaaaaaagtaggtaaatcggctttggctcatgtctgtaatcccagcactttgggaggctgaggtgggtggatcacttgaggtcaggagttcaggaccagcctggccaacatggtgaaaccccgtctctactaaaaatacaaaattagctgagcgtggtggcgggtgcctgtaatcccagctactctacttgaggctgaagcaggagaatagcttgaacctggaaggcagaggttacagtgagccgagatcgcaccactgcactccagcctgggcaacagagccagactccatctccaaaaaaaaaaagaaaaaaaaaagaaaraaagaaattattttgactcatgaagcctaaatgtattgggcacatcctaactttaggaaaggccaaacttctgtaattttgagactttctaggcttttctagaaggaagttaaagcaaatgttgagatagagaagagttagactatttgaacaaattaacttaaagtgtgaattgtagaattttgaaaaataaaatctaattattttcaagaacaattggtgattgtagtccagtctagtagtatgmacaraaacttgtggctaaaaaatgtgatcttgttcaagatcattgttttacatgggatcagagtagctgtgtgaactgcttcatactggcacagcargttagtgacatgagtgacaagaagaggtgcccaaaccatagcccagtgctcttagtttatctacctctcagagggcccttatcatgagcagccagtcatctgcagtcataaagttaatgttaattttgctataacawcttcaaaaagaacttattttttaagtagtttatattacttcctgaagctttttaaataagaaatgcataatttattaagagagattaaattcaaactttctttatattgcactacatgttgcaatagcaatttccctggatgctgtaacctcacagaagagggaaactaatattaaagagctaagaatgctaactgttcttcaggtgtccttaaaactaggtggagttagcctgatcaaaaaagcaggagaaataatattttggctaaacaaaatagcatgaacacttacaaatggaaaaagcacagatgattgttacttcctcgagttttattcatattatttatttattttgagataaaattacaagtacaatttcacttttatctaaatgataacaggtgaatggagtctaacctaaagtttctttccagttagaatttaaataacaacagtgatactaaggacatgggtctcctatcatgggggcaggaggagggttttgtgagtgtcagtttgagaactaaaygagctaatacatggaaagggtttagaacagcgagtgctagtgatgacagacactgatgttgtcaccaaaactctttaacatgactatagatttctaagtaaggattactagattattctaggttcagccacaagcataatggagtaaatgaggctccagaccaatgctatccaatggaaaaacgtgagtcacatatgtaattttgagttgtctaatagacatgttacaaaaatacagagaaacaggtgaaattaattttaatgtcttctttaacctaatgtatccacctagtgtataatttcactgcgtgagttaaataaatattaatgagatagtttacatttttttggtactaaaagtcattaaaatttggtgtgtacattaccttttacagtccatcttcattcaaccttgcccaagttcaagtcctcagtagcctyttgtggtcagggctgtataccggacagtgcagctcttcatgaaagccacgcacttccatcctttctgaaggtgcacatgtttttttgggggggtctttcttctttgttacaagatgggcagtcartgtccaagcccactgcattttggtagaaatacatgatacatgagttatagtacatataggcaagagctgggaattgaatatttggctcactctaaaaatagtttgcttcaaaataatagaatatttatttttttggactggttttcttatatttccagttcagtaaattgtggaaaattttattgtcaaagcagagagaggtttacttattattttgtttactttgatagggaaaagatttgctgcttaggcttctcttaaaaaaattatttatcgggttcagtaaacattaattgttcccagtgagcacaatcattttgcctgctaggatgattctgattatgaagagtttggtagctgaacagaagaatacatgtcctacaaatattccttaagactccttatcaaggtcactatcgaatgcattatagtagaaagaaaygtcgtagctttacacagttgaaaacaaccataactatattgcactgaagctacataaataattattaagcagatrgaaatttctgtgttacttctaaaaatttaaagatattaagtaaggtaataaggttagcttttatgtgaaattattttatcaattattttgattttttaaaayactagacttcatccattttgaaatgttagtttttcatttattaatcacattacataatgtgtcagtacacacaattgtctcttgtaagtcttttagtggtgccatggaaattttgagtttgattcatgctttgtggctaaatttgcaaatgaatatcaatcartatttctggaccttaattttcttatctgcaaatagagaagaataataagagctaaaaagaataaatgtgtatacccagctgacacagagctaaacactttccacaccttaatttatctaatcctcatcatccccagcacccacgatgtggccactatcctatcttcatttttacacatgaggaggccgaattcacccaagatcacaaagcaagtgatggacccatcattcttcaagcccaggccagagcttctctggggaatttccttgatacttaaagttatttgggggaaaaawctgagcagaattacttagaattatttgaagacacctttataaaaacttatttcttcctgtttagaagcctttacataggctcactattaggcaattctgtgttattccataaaaccaagtttgttgttgactttaagaaagaaagctggtactgtggaatagttccttatggaatgatgatgttggtcctggaaaacagatgggtagaacctgattcaaatgcaggtttgactgaatcactcctgaggttccttgtagctgggtgctctatgactcttggtgaatgcctggggttggagagcagcattcctgtccctttgttggggtccacatagctcaagaaggcaatgcagggcattagtaagaagaagaaaaggtgagtgttagctgttgagataaggtagctaaataaatttttgaacataaaagtagacctgagagcagaactctcagtccagttgtaggtctgtgcagaatggactgaatcatggccaacattttccattttcatctcgttcttcatgagcattgatcacaactagaatcagtaaaaattaaaccacagccatagatgcttaatgaagtggggaaagttccaattttggggaagaaaggggaaagagagaaagggagatggtgaagtaagggagggtagaataaaggagggtggagagagagagaatagcaggaaaacaaaaagtggctatctaggctagaatgaagccttgttagagttgcctactacaccactgagataatgatggctgaaataactcaaatcactcccctgcctgaccttggggttaagctggctttcagtgttggaaagagaacccaagagaaatgtttgttttagcagacatgttaagcttcttgtgagaagacaaagccaccgaatgaagagattaccaccaagagtgatctggacaacaaagcctcaaagcaagtggcttctcgatagttaatgtactaagtgcagaattcctaagcactctgttcagaagtggtggagacatgtttgtcagtgagcagttgattggtcttccctgagagcattttgaatcagccaaatatactgagggcaagatttaaaaggttgtatctcttggctttatttctttttttctagaggttttgaaaagcaacatttactttctaattttttccagtgaatttaaaatacttcataacataatgtgctacttatatcaaatgtttattgtgtgaccaggtaactagaattatgtcatgctgaaagtaaaaagactgtatggtcatcttctcactcagggaaaatgtaaaccaggaaaataaaaagttatgtttggttcctcggcctcactatctcagagttgtcttattgctactcaccattcaaccatggcacacagtttattggcagagttaagagagcctgcattctgggtctgtgctgccagtacatctattagaagaaatcatgtagatcccaatttgactcaatgtggagggggaagtgaaagttggctacctgaataagaactatgaataatgtgtgaaagataatttttttcttcattcctttcctttcatgtctaacaccttccctccccaaaactgcctctcctctgactgggtaatgggggtgcctgtcacaatgattttaagtctgtttgtgggtctatggctggataactgaagcagtgtttccacaaaagcataaaggttttggcacattgctcatagtccgttgcatacagcagatgttcacaaatctttcttagtgtgagtgtgtgaataagtgatttttaaaaaactcattatttgagaatttgattttcttttcatagtggctcccaaaacagggaaaggggaagttttgaaacagatccaagacacaaaagtcccagataatcatttggatgggtaacaaatttcaagatccaaaaggatggagatagattggaaacatgaggcaaattcaagaaaatgaaatttaatacccaaccatgtacctttgagatgggagagaaattgttaacagcagcatggcagcatgtgtaaatacagccagatttccctttggttgtgttgtatcagtgccagaaaggctaatgcaactctaaattgcctcaacagaagcaaacagagcaaaaaacaaaccaaaaatcaagaaagtgaagcaattattttattctgaggtcacaccaggagtctatgggcaacccagctagttgatgaagagatacaggatagtgctaaggtggccagttttagaaaccttggcacaagaggaatctggctagccttggctgggcaggtgtggsagggctaaaaggtacttgtgtctactctggtggctccaggagaaagaatcagaaattgtacatagaagtttagaaagggcagagctgagttcaatgtaaggaagaattttctagctgagttgactgtttaggggcatggaggagcaggttcctcaagttagytatgttcaagaagaggctgcacaactccttactgaagatttcctatcaggttggtctagatgagtcactgtttccytytaactctgtggctgtggttctcatgccatgttgtgaaataaagtgaagtcatatgacagaaggtaaatggagtttaaggtctgtaaaagtagatggccatcagtattttccttttccacagggtccgtaggtcaaagcaggaaggcagctgtccaaggtgctggagggaggttggcctgtgtctctggttgtgctctcttggttgtcttcatgcttgctgtttgttttaatgcctctggattttctgctttcctgttcctcgtacaaacctacacttctcccttccccacatgcacactgggccttaaactaaaacaaagagaaaaatgcactggaaatgtgttagggggctggggctaaactacaacctagagcttccttcctctgccctatcccagcaataagtgagtccatgagtccattttgctttcaaaggttcagcttggtatataaggttggactgtttgaatggattgadagttacagtagaaataaatttttttgagacacttgtactgatttgcttcttgatttcttaattttatcctttctacagtacatacatatcttgaaaggagacaggaatcttaggcaaaacaacagtgatttttatggtgaggtggaaggaacactcgatgttttagctaaacgcttctgtggcctttggtatacccaggaactgtgkgttggtaataaacctgtcaacatctccactttctatttgtgttgccttctatacatcatatgacttctcagtcccttagttttttagatggaaaaaactaagggttgtgaaaatgaaatgttaatatatgtcaatgtaaatacatgttaatatacaactatgggttatgaaaatgaaataagctaatataggtcaagaacttcttagaacaataccatgcacaaacatagtgttttagtatgttgtgttgagggggtcctcaagaccacccttttctgtatttgataattttgataatgtcttcctaacttactagaaagacccacaggacacagaaaagttgttaagactgacagttgtggtttactacagaaaaggatatagattgcaatcaggaatggaaagccatgcataaggaggagtccaggaaggaccagctgtaagtttccagttgtccttccagtaaaatcacatgaacagaacttaattctcttagcaatgatgtgtgacaacatctgcaaagtgttgtcaaccaaggaggttcatctgtgccctggtgtccaggtttttattgggggggggtgtcagtctcatgggcatgcagtacctttgtgactgaccttaacagctcagtcctcagccttccaccattccctcttgttaccaggccccaccacttacttacycaaagttagtctttgggtcaggggtttcctcagtattgtcccttcatggttcatcagaaagatgttaccagaaagtggtcccaattcagaccccaagagaggggttcttggatctcatgcaagaaagaattcaggggaagtccatagagtaaagtgaaagcaagtttattaagaaagtaaaggaataaaagaatgtctacaccatrgaaagagcagctctgagggctgctggttgcccattcttacggttatttcttgattatatgctaagcaaggggtagattattcatgcctccgctttttagaccatataggttaacttcctgatgttgctatggcatctgtaaactgtcatggtgctggtgggagtgtagcagtgaagatggctggaaatcactctcatcgccgtcttggtttcggtgggttttgtctggcttttttactacaacgtgttttatcagcaaggactttatgatctgtatcttttgctaacctcctatctcattctgtgactaagaatgccttaaccttctgggaatgcatytcagcaggctttagccttattttacccagcccctatttaagatggagttgctctggttcaagcacctctgacactcttactgccttaaaagggtcaaactgatacagtgtgacctaaagcccagacatacaaaaccaagcatgcactataaatcacactgttagcataaactacttggcatgaagtcaggtctcagatatacaaagatctccttatcaggtagactactctaagggctcagaggagccaaaggccagtcttgaaaacttgtaatgtgtagggtttgggcaccccaggtctaccgagttaacaatttactgcacatatatgtaagttttacttatttgaacaatttaaccattttcatgataatttgtttttagttgtgaacatttattaaatatctactgcgtagctctttttataaccttttctctgtaagctggaaaataatttggtttaattcatattataaacttcttagaaaaaaatcattattactccagtataaaaggacacatcaaaaactaatgatcattactagtattgcaatagtggttggtcataagagtgcttcataagttttaactataattccatgccaaatgctctatgcatattattagttgtagtcgtctttatcaacaactgtgggaagtaggtaatacttctagtatacaggtgagagaatcaaggtccagagagttttaagaactcccccaagcttcccagccagtaagggacagagtctaactttaccatctgattcatggtcttaacatcatgcatggtagtttccaatgactctgagagacaaaaggtttaaaaggtacactaaaacattaaaaattcaacaaactttatatatctgaaggtacacagaatatttagatgctggggcagagtgtggctagaatacatatgtcccttttaccaagagaagagatcactgcaaagattattccagtactccaaaatgctkttttgccgtaaaaatgtggtttagcaagcaaaagaagtaagaaaaacagagatacgaaagggaatatattatgtagttattttgagtgtctttatttcttatttttattttggagacagggtctacctctgtcacccaggctggagtgcagtggcacaatatggctcactgcagcctcaaactcctggactcaagcgatcctcccacctcagcctcctgaatagctgggactactggcatgtgccactgcacccagttaatttttgagtgtctattaaaaagagaaatataaaatccggatgtcttcaaaggttccaaaattgtcaccatgaattgtttgtaattctgtctttttccctcccctcttgttagatctcagtctgtggtagaagctgggaccctgaaacatgaggagaagggagagaatgagaacacccagccactcctggctctggactgaaccctgagtcaccccaatgctcctgcacactggccttcagtggtatcagccacccaggaagcacatgcacaactgacccatgcagacacgtgtgttctgcttgacacaaggtcctccactcctgaacccctgcagtgactgtcaccagccatcggtctgagcagccaaagttggacaaagacttgagagatgcttttttytyyccccagtgaggggactggaggatgatgcaaggcatttatgtaaaaaagattctccctcctttcatatttattgtagtaaattgaaaaaataaagactaaatttgatggacacactgcattaggacaagaatttttctgaggtatcacacagggaccctctccagtttttgaaaattaagtgcatttccaagtaaatgtatcagagttaaactgtacagacaccactgtcaagtttcatgtagtacaaagccctgagacaatagtatctccagtaatttccattcttactgaattatttcctttgacctcatcaccagcatcgaattgttcagcctaagagcatgttctcataggtctgggtatttgcaaagtttgcttattttgatgatatcctgcaaaaaattattttgatgtcacatctcttgtcaggtcactagctgactgtcatgagctgacgttaaaggaagacacatggacgtgaaatacgattatttcatctgagcaatgtgagttaccacaggcagctcaaaagcccattagtgcagcatgtgtctgcagaggagatgtctcatgaaaatcacatgtcagtgattaatgaatccattccagttgcctcaactgggtcactacagcaaagaaaagtgctatcaaaccatttacccttgcccccacaaccctcctgcaaccattaaagatgtggagaaagaccatggttgttgctgagagggtaaatattcaatcatggagcatgacccatatggatggctaaatatgcaagtactgaagtaagagaagactagaaatgcaggatgaaatgtcaaaggtcattttatttacctagtctccttagaaatggagtccccaactactcattcaaaagaaatcagacataaaataaacagacatcatatatgayatccttacttgtgccatgttttccaagaccagtgcatatttttagacatctcttattcgcccagccatctgcatgacatgggtatttattagtattaccagttggtgctcaaagtcaaacaaaaatattttagttaataatgggcagtaaaatatgattttacattattttaaatatttgggagagttaatttgttagctaaataattcaagggaaagagattattcaactggtcataatcacccctgataatattattactaatcttaattatttattacatcatctctttctcaatggatctaatgttttaattttttcccctattggtagagaacaataacagaagtaatttttatattatacacttggagaaataaagttgaaacagaattaaaaatatttctcaaacaactgtatcacaatataaattaaactaattcatttttgtgtagacatacgaaatcacaaaaataataacactgaaataattctaccaatgcagtgatggaaacacttttcttatgtaccaagacatagataggtaagagaaataaagaattgaagtgaattagaaaatccattttattgcttgggtttaaaatagttgtgggatacaagtatttacaatgctattggagtcaattattgacaacactttgcaacagtaataccatttctagcttttcaattggcaatacttagaaccttactgtagtgacctgattttaaataccatattatatttactaagttaagagctagtttttactctcttccataatttcattacatgaatgtaagatgatggctcaaaaatgacgacttatagtttgaatttatgtgtatgcaatatacatatgagaaccaaattcaacaagtgacatgaatgttactacatgaacattgaattgtattgcccttgtcagttatttcctctgttcaataaatactgaaggtcacaaacacctttttacttttcaagagtttgccttctcttctcgattttagtaattaatttggatatttttcctcccatgcctcttcatctgatttagtgggatgttttcaataccagcaaaacaaaagaacaggaaaagtattttgcaaactcatctactggaagctaatctccttaaggtcaagcaaaaagggtcaatttcaatttcaaagagctgttctttaaatgagataaagaaagtctccttttgtttttagatggaaaagaaagcacaagttttttctacctgtgaatgaactttggtgacctatatgtgccattcatgcagcatttttgttcatattggcttagaattcagtgcatgaatatcattacattcttatatctaacattcctagttagctttgattcaaaatatacaaaatctgatacatgaatactttgctagattaatgacttgatcatctttggaatgagtaggcaagacgatttttacctattatttctatgttgtgggtaatgttaaaactaaatacagatgataataattgctatttcacagtgatgtttaaaatggcagagatttctcaagccagagagatgggacagtcttccaaactctttcatcaaaaaggaaagtaatctggacctcctacgcccaagaaaaacatcctggcattcttggtaaccttttactctgccatccttaatctttctacagaattgtagcagaaatcatctccaagactgaagagctggcttcctgacattcacatggatctaccataggcaaagacactgtgttcccagcccttgcctcatggatggcaaagccgccaggagccagacaccctagcagccacctatccacccaaccctgaaagaacatagttttatttccgtgaactatactttttccccagaagctctaataattggcattaaaaaaatttgcatctgggatttttataacaatataaaataattccatgctcttttttcggtgtgaaaagttcctctttgaaagaaataggattttgtcaatatctccaccactagcatagtgagaagaggatctcaatcaagataaaaaaaaccaaacgatttgagagttgggatgggtacagttcatagacactgacataatgagctctttcttttttgttaggaaaataaaactgcttttttcatgagtatcttttactaagaagaattaaaagagggaagtctgagttccccagtaatgctaccattaaatagctagaagtaaagcatttatacagcttgtcattaaaataaacaaaaatgtagtggtacatgatgacaaaatagtctagctacactagaaaaatataactgcatagaaaaattacaaactaaagcaatccattcacagtttctacatatgttctcattatacattgaattagacctattctatgtggaaaaaatatctttggctggtaaggtagaagctatcaaatgttcaccttaaatactggcagaagaccagtgctgtcatgagatgacacacagcagggtgtttcctaaatgaattgcagcgaggcaaatattccctttagtgtcttctgaccctaggaggaggctttgaattactcgggctgcaagtcaagggaattgactcttggtgttcgaaattctatcctcacacccaaggagatggaaccagaaaggcagcctctctccagagtttcccaagcttgcatgaattcatgctaaattgctggaaggctgcgtctctgctgtggtgtcagttccggatgccacacatccacgatgaatatcagccggaaagatgaggcatcctgccatacctcgtgctcaaaggagtcatcaaagatgagcaccttgccttcctcccaggtcctgcagcagaaagacaaggattcctgaatatagttttgtgtggttcagatgtctgaggatcgattcctgtccatgtgcgagaactacctttggtaacaacctttgggacataaccaaataactagaacatcaagcccaagtttattcttcccttgatgattaggaaagaatttcagaaatcttgctatgaacatcagttttcattgctcagtgctggagatgtacaaacaacagaggatttgtgatgaagacatattggtctcattacatgccttgcaattattctgtatattattacatgtcttgcaattattctggtttagacatatgggcagtgactgggtctcaggcatctctatgcctctcaagacacttccaatcaattgtcttttcagctcactccacttgttcaagtttcattttatggaagaaaggaatctgcttaaacacagtaccataaagcagaaaactaaattaggagtttcctagctagtattccagctgaagaaaatgggcagattgggaataaattttgtttatatttttagtatcatcttctatgcaagtgggttatccatgggatattttaaatcaatgctgcaaaacaccctatagagcttccaactttacctcataagatatctgtatagggactgcgatctaaatatagtgttagtctattaagagagaaacatacaggaggcagtaacacaatgcttttcaaatccaaagagagtttatgagggacactgatggttccttattttaaaaatagatattaactgccaatatattaaataccaagttatgtttttaaaataaaatttttgctagaaaattttccttagatactaaaatgccacttaagccttcaaaattttacatcctggattagcaaataatgactattatagcatgggaaatgctagcttgatttcaagttactatattatcataaagaggttttctgtgcgaaaactagtggtgaatttttatgttccatatcaggtgattaactaatataaactgagcaatactacatatattgcagggcttcacaaccgtggtactactgacatctaggctggatcattctctgttgtaggggctgttccatgcactatgagatatttagcggcacccctgacctccacccactgtatggcagtagcattccctataccatgaggttggtgcaaaagtaattgtagtttttgccatagttgtgacaaccagaaacatctctagtcattgccaaatgtccagggtgggagcaggagcaaaaatcattccagtggaaaataactgacatactgaataagtctgataataaaatttccaagttatgtaaactaacagataaagtactgagtatttgcaagttgaaagttcactgaagttgggaactgaacctctacttctactacccaccctcccacctccacccagtgtgctatctcatacacttcgtgatatggtttggatgtgtccccacccaaatctcatcttgaattgtactcccataattcccacatgctgtgggaaggacccgatgagagataatttgaatcatgggggcagcttcccccatactgtcctcatcatagtgaataagtatcatgagatctgatggtttcatcaggggttcccgcttttgcatcttccttattttctcttgccgccaccaggtaagaagtgcctttcagctggatgcggtggctcacgcctgtaatctcagcactttgggaggctgaggacagtggatcacaaggtcaggggttcgaggccagcctggccaacatggtgaaacccccatctccactaaaaatacaaaaattagccaggcgtggtagcgcatgcctgtaatcccagctactcaggaggctgaggcaggaaattgcttgaacctgggaggcagaggttgcagtgagctgagatcatgccactgtgctccagactgagtgacagagcaagactccatctcaaaaaaaaaaaaaaaaaaaaagaagtgccttttgcctcccaccatgattctgagtcctccccagccatgtggaactgtaagtgcaattaaacttctttttcttctcagtctcaggtatgtctttatcagctgcatgaaaacggactaatacaccttgcctcatctcttgcattcaacacacacatgttgattggctcttctacaactcctctgaaggtttttagagttccattggagttccatcaagggtagcaaaagacagaaatctatggacttaggagaaaatgacagaatatgcattcattaccatgcaaaatctaacttgagaagaaaggcaaaaccaaggcggggaaatacgctgacaagaaaaatcagtgaaacagtccacagcttccacagttaggcaggcattttctaggtctcagtgttgtcaccgggattaagcaatgtcagtgggtaccacaaacgagcctataatttatgtagaagatgagggaggaagtgtactcaaaatgaaaggcagtgcacctatgttcacagcagcactattcacaacagctagaaggtgagagccacccacgtatctatcagtgaatgaacagacaaacaaaatgtggtatacacatacaatggaatattaattcagccttaaaaaggaaggaaattttgacacatgctacaacatgtatgaactcagaggacattatgtcaagtaaaataagccagacacaaaaagataattactagttgattctacacatctgaggtcctagactagtagttaaattcacagagagagaaaggagaagagtggttgccagtggccggtgggaggacgggaatgggagttatttaatgggtatagtttcagttttgcaagttagaaagagttttgaggatagatcatgttgatggttatacaatatggatgtacttaatgtcactaaactgcacacctaaaaatggataatatggtaaattttgttatgtgtattttactacaattaaatagagaaaaaagggaaaggcaaaggagagcatgtggtagaggagaaagaaagaagcaatacaggaagatggaaatttatggtctttgaggggaatcctcttgaccttggcatttattacttatgggacctaaggtgagctacttagcataattgattctttgtgtcttcatcggcataattgatgtgaggattagcatatgattggcaatagtagatattcaattaatgacagaaaaatgaaaatataaagaaaaatagggaaaagataaaagacagaggtgaaatgttgggaagtggtatgttatcaaaaatgacatatgcatcactctttatgatgttgtctgccttcctttgagacaactaaaaacttccaagggagatgagatataaaaacatcttcagagcatctgtgaaatgtagtttgtacagcaatgacaagtgattttcaaagttttttgggtggcagagaacctggaaactacttaaaacactagaagtaattaaaataactgaatagaaaattctagcccacacaaaatgacatttttcactagattatgatacgtataacaaagccaaagatctagaattgttttctgggaaaaaggccttaagcattccattcattaaattaaattcctgagaactgggaaaagttattagcaccggaacacgctggtcactcatggaacatcagtgcatataaaagtagaacttaagaaccacaggcttgcagctttccagatacattaagtacaatacagatcagtgtaaaccattaattaaccaattgtataaataagaaatttggggaggtataccaaagggttgttaattggcctgtttcagggtcataaaactctatggggaaagtgagtgctgtcggacttatttgcccttccactttctttcat

SEQ ID NO: 93483 - DNA, 13786 bp, Homo sapiens
ccagcctggccaacatggtgaaaccccatctctactaaaaatacaaaaactagctgggcatggtggcgggtgcctgtagtcccagctacttgggaggctgaggcaggagaatcacttgaacccggaggctgcagtgagctgagattgtgccattgcactacagcctcagcaacagagcgagactccagctcaaaaaaaaaaaaaaatcctgctcttcaaaaggcgccgtcaaaagaatgaaaagtcatagactaggagaaagtatttgtagaagacatagctaataaagaatatatgtgtgtgtgtgtgtatatatatatatatatacatatatgaagattttatatatatacataatcttcaaaatataaggaacactgacatggtttggctgtgtccctaaccaaatctcatcttgaatcgtagttctcataatccccacgtgtcatgggagggacctagggggaggtaatttaatcatggggacagttaccctcatgctgttcttgtgacagtgggtgagttctcacgagatctgacagttttatgaggggcttttccctgcttcactctgcacttctcctcgccgccgccatatgaaggacgtgtttgcttccccttctgccgtaattgtaagtttcctgaggcctccccagccatgctgaactgtgagtcaattaaagctctttcctttataaattacgcagtctcaggtatgtcttcgttcacagcatgagaatggactaatacaaacacttaaaactaaacaataagaaaataacccaattaaaaatggggccagacggggtggttcatgcctgtaatctcagcactttgggaggctgaggcgggcagatcacttgaggtcaggagttcaagaccagcctggccaacatggcaaaatcctgcctctactaaagatacaaaaattagccaggtgtggtggcgtatgcttgtaatcccagctacttgggaggctgaggtaacagaatcacttgaacccaggaggcagaggttgcagtgagccaagatcatgtcactgcactccagcctgggagacagagcaagactctgtctcaataaataaataaataaagggcctgaaaccttaatagacatcgcagcaaaggagatatgcaggtggcaaataagcctatgaaaagatgctccacatcatatgtcatccaggaaatgtaaattaaaacaacaatgagataccactccacacctattagaatggcccagatccagaacactaacagtgcatgctggcagggatgtggagcagcaagaaccctcattcattgctggtgggaatgcaaactggtacagccactttggaagacagtttggcagcttcttaaaaaattaaataaactcttaccatacaatccagcaatcacaccccttggtatttacccaaaggaaatgaaaactatgtctacacaaaaacctgcacgtggatgtttaccgcagctttatgtagaattgccaaaacttggaagcaaccaagatgtcctgcagtgggtgaataaactgtggtacatccagacaacggaatattatccagcactaaaaagaaatgagtgatcaagccatgaaaagacatggaggaaacttaaatgtatattactaagggaaagaagccaatctgaaaaagctacatactgtatgctctaaaaaatagagtcttaaaaagaaaaagtacatggggtaggagagcagatgctctggcgagcagagccacagtccccaaactgtgttccatgaaacactagctgtgtgatgctaacaagcatttcccagaaaaaggctccaaggacaaataaatatatgaagccaggcatactaaatcccccatcccagattcatagcacaaattaacatattctgaaaagtcaacagccactagcaccctcattttggtcaggcgcggtggctcacacctgtaatcccagcactttgggaggctgaggcaggcgaatcacttgaggtcatgagttcgagaccagcctggccaacatggtgaaatctcgtttctactaaaaatacaaaaattagtcaggtgtggtggtgcaggcctgtagtcccagctacttgggagactgaggcaggagaatcacttgagccggggacgtggaggatgcagtgagctgagattgtgccaccacactccagcctgggcaacagaaagagatttcgtctcaataaataaataaataaaatcattgtgatgaatatttttattatgcttttttcaagacatttattacctactttaaaaataggtgggaaataggaaggaatataatactacaaatgtagcacattggaaacagccctaattttagagtttaaagagtactggtgtttaagtcctgcttctgtcatttgacctttgagttccaggaccaattctgtcatctgacctttgagacttaagtttccttatcaatacaataacagattttccctaagttacagtttgacgatggaaatcccagatcatttgccaaagaatcgaaaaagagagaaattatcttgagctccgatagttggggaaggcttcccagaagagaggtacaagaagacacggggtagggttcatagcagtgaaaaagacagtaggtgccttattccttgtgagccaggcacagctctaaaatacttcacaagcaccaacttttgtaatccttacaacaacctgtgaaaggaaaataaatcttggggcccccaaatcactaagctaaagggaaaagtcaagctgggaactgcttagggccaacctgcctcccattctattcgaagtcccctctctgctcactgagataaatgtataactgactgcctcatttgaagaggctaatcagaaactctaaaaaatgcaaccctttctcttttatctacctatggcctggaagccccctctccactttgagtcgttccgccttcgcctcaagttgtcccacctttctggactgaaccagtgtatatcttacatatattgattgatgtctcatgtctccctaaaatgtataaaaccaaaccatgcctcaaccaccttgggcacatgtcgtcaggacctcctgaggctgtgtcacgggcacgtcctcagcctggcaaaataaactttctaaattaactgagactggccggtcacggtggctcacacctgtaatcccaacactttgggaggtcaagacaggtggatcacgtgagatcaggagttcgagaccagcctggccaacatggtgaaaccccttctctactaaaaatacaaaaaaattagcagggcgtggcagcgcgcacctgtaatcccagctattcgggaggcggaggcacaagaatcgcttgaatctgggaggcagaggttgcagtgagccgagatcgcaccactgcactccagcctgggtgacagagtgagactcattctcaaaaaaataaataaataaaaattaaaaaaaaaataattaattaactgagacctgtctcagattttcgaggttcacaaacccatggcataggtactatttttatcctcattttatagatragaaaactgaggcattaagtggttaagttacctgcctagagccacacagctagaatctgaaccccaaatggcagactagaatctgaaccccaaaaatctactttcagagtccatgttctgaaatacaaaaccagggcagggataggttacagttgtcacagagctagggaaactgaggcctatgtggaaagagaaccactaggtcagtgcatctcaggctgtagagtgcacgtgtcccttggggatctggttaaaatgcaagctctgattagactctggggatgctgatgcccctggtcccaggaccacactttgagtctgcaaaccaccagagcatggtggttaagaatttgggctcagaggtcagatgggcttaggatgaaattctagctcttcccttttcttactgtctggccctgtgcaatactccacacttcctgggtaggtaatcaaagctgatggcaggagattcccagctctcctctccgagttgagagctggaggcgctttggtcaggagcgcccagcttctgggtcccaaagcagcttagtgggtgctgggaacccacaagcacccctagaaagcttccagcccaacaatggtgaattctaagtagccacaaaacccagctaggaaagaaacaaataatagacattaaaaagaaactaaaaacagttcattgtaacgagacactaagtaatgtttttatatatttcttccatcttacttctgatggtatttattcttaatgttagtattcatacatacaaattgtggagtttaactcacaactatatgcctataaaagaatcatttaattctgagccattttatttctaaaacagaagcactttccaacgggtcctctttcactctctagggatcgtgtctggcagatccaaccacagtagctgaaggtaaatttatgaaggatcctcttctgtcactaggagctgtcttacctgatattttcatacctattttaaggaagagagggaaacgtgatatggccaattccctagtatgtagctgcactgccactgaaaaggcaaatcagtaggaataaaccaaatgttcaatgacacatgattttggcagcttcctcctttaaaaccatgagaatggtgagacctccctcgatggctcattttgccccaaaccccctgtccagaatgttcttccccatgtcctctgacctcccactctcatgtccctaaggtctctgcccaaatgtcacctagctggaaaaagcttccctgaccagcattccactttaattttctgtcctggtttattccttttcatagtgctttttaccaatggacacatttcatctgtgtctacactccatctccccactcgaaggtaagctcctcaagagtgagacctttgtccatttgtccccactgtgtcccagggctggaatagggtccaacccatgggtggtggtggcagggggtgctcatacaggtttgtggaataaagggaggacagtgtgattgagcagaaaagcaatcatgaatttcaaggtcagtaatttcaaagtcagtaagtcaaagtctatgaggcacttagcaaaagatctctgggtgtttgcaagacagtactcccaggggaacttcagggaaaagttcctgttatagaacagttggctcctgttcctgaacttggtgcccagcccatcttctagggctgccaacacctgtagctcctgaggtcaggctcactgggaccagtctctctccaggcagacatactgggcatcagggagcctgggtcagagttcctcctgtctgcccaaggcctctagcctgccttgtcctcactcccccaacccccttagctggctcctggcttggcctgtggccrcaatcctggctgctcatcagaatgacccctgtgctgtgaagagggcccagaggtgtttaaaatgctccaccacaattccrgcacacagccagggtgagaagtgccacaaggtccttgcctgtccaacatgtgagagcagatcctgcagctgctggcagccttgcgacagaggacgcaggacccctcacctgggccaccagcagcatctgcgtccctgtgacccctaggcgtcgcagccctgtttctcctttggcctgcttgctggatcctgtttgcctgactgagctgtccccttgatcagagctgccctctactcagggcgattggtggtttgaaacaaacaaagtctcaaacactaactacatcatgcttttcaaaatctaggtcccctcccccaaactccctactagtaacccagcatcacctgccaggcccactgagatacattatttcctttgaattatttcctctccttcattgccactccagtctctctcacactgattttaaaatctaaaaaaattccaggggcctgtgcggctgcaggcggtaccaagggaaygggtctcactcggaaatggcagcctccatgttctacagccagctgttggccgcagctacccttcggggccaccttctctggacagccctgcgsgccactgctcaggctctaggaagttatggattgttgaataaccatggactccaagtacagcagcaatagcacaggaatctctcactacatgaatacatgagtatggaattattgcaagaagctggtgtctccgtttccaaaggatatrtggcaaaatcaccagatgaagcttatgcaattgccaaaaaagtagrtacagaagaaagaaataacatgtgcaggataaactgtaactatgagtactgctggcaagttctctgggactcacaagtagtaagaagcaggttcaaaagaagttgagatgaaggcgcaggtttcagctgatggtcgaggaaaaggaacatttgaaagtggcctcaaaggaggagtgaagatagttttctctccagaagaagcaaaagctgtttcctcagaaatgattgggaaaaagttgtttaccaagcaaatgggagaaaagggtggaatatgcaatcaagcactgaagcgaaaataccctaggggagaagactactttgcaatagggatggagaggtcatttcaaggtcctatattaataggaagttcacatggtggtgtcaacattgcagatgttgctgctgagactcctgatgcaattaaagaacctgttgatattgtagaaggcatcaaaaaggaacaagctctccggcttgaacagaagatgggatttccacctaatattgtggattcygcagcagaaaacatggtcaagctttacagcctttttctgaaatatgatgcaaccatgataagaaataaatccaatggtgaagattcagatggagctgtgctgtgatggatgcaaagatcaattttgactctaattcagcctaacgccaaaagaaaatctttgatctacaggactgaacccaagaagatgaaaatgacaaagacgctgctaaggcagatctcaactacattggcctgaaaggaaatacagactgtctagtaaatggtgctggtttggccatggcctcaatagatataataaaacttcaggggccaggagtggtggctcatgcctgtaatcccaacactttgggaggccgaggcgggcagatacctgaggtcaggaggtcaagaacagtctggccaacacggtgaaaccccgtctctaataaaaatacaaaaattagccaggtgtgatggcggacacctgtaatcccagctactcaggaggctgaggcagcagaatcgctcgaacatgggaggcggaggttgcagtgagccgagatggtgccactgcactccagcctggacgacaagagcaaaactccatctcaaaaaaaaaaaaaaaaaaaaaaaaaaaagctttggggagggactccagccagcttccttgatgttggtggtggtgctacagtccatcaagtaacagaagcatttaagcttatcacttcagataaaaaggtactggctattctgatcaacattttttgaagaatcatgcactgtgatgttattgcacagggtatagtcacggcagtaaaagatgtggaaattgaaatacctgttgtgggggttacaaggtacacgagttgatgatgctaaggcaccgagagcagacagtgggcttaaaattcttgcttgtgacgacttggaggaaactgctagaacgttcagaaggctctctgaaacagcggacttagccaagcaagcacatgtggatgtgaaatttcagttgccaatatgatctgaaaacccagaggatggctgaaggtgttaaatgtgctataatcattaaggatactgtgttctgtgttattgttcttctttttggtgtgtggaggttgtaattgccatgtaggtatacaaacttttaaaaacatttggtttgcatttaattctatttatagaacactgtttgtataaagaacctataatgcaggtaactaatttcttttgttgcaaccagtcttatttgcttctcctacaaaatgtaacttgcaatatgtctgtttattattgttggatacaaagttcttcattgataagagtcctacaaataaaataaattaaaaaaaattccagggtttaccaccagctctgcactaagcactaggacaagcactttacaaatatttcatataagtctcgtaacaaccccataaagtagatactattattctcattttacagataaagaggcaggatcagagaggttaagtgccctgcccaaggtcacatagcatgttcttctctgccatgaaactcccctaattcttccatcactttccaaaaaatatatctctaacaatttcccaagttcatcttgtgctctccttcgccacagccaccttgctggaagcctcctgaacacctgccacccagtcccggggacctggccagtctcttcacttcaattcattctttatgtagctctaaggcaaatatttaatttagtttgcttcatggtcaagcaggtagcatgacctgtgctgcattaaatgtcaaccattcaacttaggatttaacaagggatgccccagtagaggtggggacagttgcttcatcttcaagtccttcctccactgtagggggtcctctcactcatgctctgcctcctggaacactctgtgtctagcagccagagtccacagtgagaagggttgggaggtcggaagcagagcagattaggggagccacgcagtctcgtggcagtgaatgaaaggatgttttggtgacagggaccggccacaagctggagatgttgaaggggcaggagagtcagcgccacagacctgacacctggcggatcctgacacctgctgagctccctggaagccttccatgaacaacactctccgaccacaggcacagcgtactctctgccagctcgacttctgtgcatccttcacactgtattaccttatataatcttctcccactgcttgttcaggcgaagttatttcagtgactcatcttttcttctcccaagataaactgtaaattcctaggtctcattttcttctgacctcaatacagtatcctgagcccagcagggctggagggaagctggcgtgatgtgtgacttcacctgcctttgaacagcgtgagactcagggaagtcacctcccctcctggcctctcctttccttcttataaacatcaactccctcctccgcattcaccaagaaaaatgcctttttgctcaaaatagtttgtatttattttctcagctttgcaatcttcttgtaaagacaagggctggacttgatcattcctactaaagcaaatggaattctttttaaacaatttacaataaaatctgacccagggctaatggcatggacacccgcttcaaatgaattggaggaaatggaacaaagttcagagagagaggtgcatctgattcaagtgcctcccacgaggcacttgtgttcactgacattaatgaactccagcagttcgcagggcacttgctgggtggcgtggggaagagaaagaagtttaaaatagacaggttctgccatcaaggaacttactctgtagttggggacacaaaacctgcacacatttaaggtcaaggatatgtcacaatgagactaaggagtccataaaactgaagaaatctctgagtttaatgaatctaggaaggcttcctggaagaggtgagatgtgagctgcctcactaggggtggagacagctggtaagtactggtgaatccatgaaacaaaaaatcaacaaccctccaatggggacaattttaagaaaaacaaaaaggttccctcttttcttttccccttttccttgcttctgaatttaaaaggaatagatgctcatgggtataaatttataaaacgggggaaaaaagaaaatgaacatcacttagaatcacgtaattcaaagataactattagaatttcagtgtatttgttctagtttttgtgtccatgtttatgtatattttaaaatatatatgtataaaattgggatcctacaggatagtgttaaaactgaatttcttcttatattgtgagcacttactttcttactgaaggcctttcggccaggcatggtggctcacgcctgtaatcccaacactttgggaggccaaggcaggcggatcaggaggtcaggagttcaagactagcctggccaacatggtgaaaccccatctctactaaaaatacacaaaaaattagccaggtgtggtggcgggtgcctataatcccagctactcaggaggctgaggcaggagaattgcttcaacctaggagacagaggttgcaatgagctgagatcgtgccatcgcactccagcataggcgacaacagcaagactccatctcaaaaaaaaaaagttttaaaacttcattttaatggctacttattatttcatcttttgactggatcctgatttatttaatcattctctgttgtttccagtttttcattattctgagtgacgcagcaatttgcctttggtaattaaagccaggaatcattcaggcagagcctggttttgttttattggtgctaaggaaatcaaacagtaccatgtggctgcaggagaggggtacatctgcaggggccgggacatgtatctcatctgggaaagattcaggattgaagagatcaagaggaaatgctgatgaaaatgaatttggggaaggaggcaggatttgagtttccaaacagatcttaccgggagtagaattaaacagcagctgaattctccctggggagatagtgtgggtgagacttgcctgaagtaacacacaaatcagtagctgtcagtggcctgaccttttggagctctagagcttccgagacactcacccgtttccggccaatcttggttaatctgattgccaccttaattgaggatggggatttaaaaggagagaaacgtgtctgattgatttaatgtcagggcttcaattcttcatgaactacaggcttctttgggctttgatatgctcttcaagcaaagaatagatgaaaatgaacagaatgtttttccattctctgtctctcgggaccactaacagcaggaaaattttatcccaaccattttggggaaatagaaagcctggtttcaaacccagcttcagctttggcaaagctgtacaatcttgtgtgccttggtctacttatccgcaaaatggaaggaagggaatctacttaatagggttgtggtgaagactagataagttaacagagtgaagttcttacaactattcctagcacacagtaagaactcagtaattgttagctttcatcatcatcatcatcagtattactatgataattattattaaaatctttttcccaacttaggagaaaaaaggcagggtagaataaaatggaatgttggagcaacgatagcccttaatgtcctttatctttattttattcttggatgtgaagtaccaatcgctattaagacatctaaatccaaggccaagcatggtggctcacacctgtaatctcaacactttgggaggtcgaggtgggaggatcacttgagcccaggagtttgagaccagccagggcaacaaagtgagacctcatctctaaacataaaaataaaatcagccaggcatggtggcgcatgcctgtagtcccagctacttgggaggctgaggtgggaggatcgcttgagactgggaggtcaaggctacagtgagcagtgatcataccttgcactgcataccaccatactccagcctgagtgacagagtgagaccctacccgaggacaaggctccatgaggaaacacaagtgaaagggcatcatcatgaccgtcaacaacagctaaagtgttttgagcttgtctgttccaggcattatgcattctttcatttaatctttacaaaaaccctatgaggttgatacagttatccttgttttacagatggcactaaacctaggctcttatctaatatgttgacttgtaaaaataaagaactgaggtctctgcctgcaaataccttatattgttggtaggtaaaaaatagaattgaaaatatattcaccaggaacatggaacatataatcaggatcataagaattaactgttaaacacacacagagcaaggttgctgaggaaactagagatgggatgggaaggggtcagaggagactaactttgaacattatttaaatgagaaggattccattgtttagtgagaaagagggttttccatgtcagaaagggtgaaaagaaaatagacatgtcctgagtgcctattattttaactgcctaacttgagcactttgttaaaaaaataaaatcccatgaggttagtattgttaatcttcagaagagaaaaccagggctcacagaggttagttaatttgcctacgatcacacaggaagtgaggaacagagtcaggaacagagccagggaggccctctgacttcagagctgcaggagatttgaactgagaataaatatgccaggtggggatatgaagaaaatgtgctcaagtaggaaaggacaatttccaggatggattattcttgaaaatcaggtgtaactgacgaaatctgaacagactctgtggatggcaccccccaagttcctggtgtggatactgaactatagttacgcaggatgttcacactaggggaggctgggtgaagggtacaaaggacctctctgcgcatttctttgcaactgcccatgaatccatatttcaaaataaaaagttttttaaaaagttggcagataggccaggcatggtggcttatgcctataatcccagcactttaggaggtggagacaggaggatcacttgaggtcaggagttcaagaccagtctggcgaacatggtaaaaccccatctctactaaaaatacaaaaattagcctaatgtggtgcatgcacctgtagtcccagctactcaggaggctgaggcaggagaatcacttgaacctgggagacggaggttgcagtgagccgagatcacgccacggtactccagcctgggtgacacagcaaaactcttgtctcaaaaaaaaaaaaaagttggcagatagtgaaggcaaagatgcttctttcttttctttttttctttttttttgagatggagtctcgctctgtcactcagactggagtgcagtggcgcaaacttggctcactgcaacctctgcctcccgggttcaagcgattctcctgcctcagcctcctgagtagctgggattacaggcacacaccaccacgcctggctaatttttgtattttagtagagacgggattttgccatattggccagggtggtcttgaactcctgacctcaagtgatccatccgcctcggcctcccaaagtgttgagattacaggcgtgagccactgtgctcagccaaagatgcttcctttgagcaacggtggtaactggtggaggattctggttcaggagtctgatgggccatggaggcacaagagcatcccagcatcatgccagagcctctccctccactccttagagcgaccaaccagccccacaccaggttggtcacaaatggagggagaataagatttgctgactcatatattgagtatccattatgagtcccccccactgtgccaagagctacctggctatatgagacattgccaagacacagggctggtttggaggctcttacagtctagttggagagaaaaggcacaatcaataaaatataagcggcttgggtatactgatgtttctcatggaaagttttatgtgttgcaaaagct

SEQ ID NO: 93484 - DNA, 34727 bp, Homo sapiens
cccaaaatgctaggattaccagtgtgagccactacatccagccctcatttattttgttgacagctgttgtctctttgctaccaagggtccacccctaacaggagcaggtgcctgctcaagagctcgtctgctctgctgcgggctggctgcagacaccttcgtttctcctcatagctgtaacagtcctgtctgagcaaagtgcacaggttttacagcaactcttcccaccctaccctcaagggattttgcttactcttttgctgcatctggcctctgggtggcacttgccctgctgagcctcacgctgtcacccctctcctaggagaagcaggtgatggcccaggaagcctaatcccagtgacacacaggccacccaccctccgtcctgcccacacctccggcagctccagctcattcagcctcagggaatcccggggccttgtcccatgcaaccggccagctgtggtgtgagcgagggactgaaagcccgtatgtgaccagctctggtgatgagatccccctgcccccgcctggcacatgttcattcattccaggtacggtcagcactgagtcctcgagggcctggagcaccgcgggggagacatcccggtcaagctgagtttccccgacgcctggccaagcactgagacccagagtgcggtgggctccagcgatgaacagcctggggaacgacgtctttgctctgtgtagctgggctccatctccttgcagcttgccacctcctggtcctaattcaagccatcccggctccttggctgcaggattccagactccttctcaggcacgacccagaagggcagccaagaggcctctgttccaccgagggaaaacagagctctcaccaaaccagtcaagcagattcccactaagctagtttgggttttttaattggctagaggcctagaatccaactggcagggatggagcagacagatgggatcctayatgaagctcctgactcattcaacttagaaagggaagaaaaccttattagtcagtttcaaagggctgcgacttcgcaggaaggcttctctggcccagccagctgggactgcctcgcccccctggctcgcaccgcctggctctgcctggccctgccagaggctgctatatcctgggcattgcagcagggtaccctccaaccccattcctatacccgagaactgctgcttcctgggtcctgaggtttcctgtgtgcccaccagcaggctggaccagatcaaagggtgtcccacggccatcctcacggggccacccatggcctgagctcaaagtgaccttgcccaggaggctactggtgtcatggagctccacctccccaggatttcagcatgtggctggggacatggacatctgctcagcccagtgggtacagtttgtctcttgttgaccaaaggatgctcaccagaccttatctccttcccaacccctttgtgggtcccccactgccatccacgggcccatcgctcccctcactgtagccaggtggagaatctcccttcagagttgctggaggggttgcctaggcttgacttcatccatcattgtcatcctctaaaagccctggccaagggatctcagcccacagggctgagccaggcaccctgtcaaggggcgctgcgcagggccccagagcaccttgagtccaaaatccatcaactcacccaacatctcttgcacacctgccatgtccctgacactgtgcaggcaccagcagtggtgctgggatgaatgaggcgtctccgatgtggtgatagagcttataatatcctttatatttgttttcaaataacatgctttcaggaggccaataagcaaaccataatatggcagcatgaaaacatcaaacgttagtcttccttttcccttttctttgtgcctactatgtgctgtgcacatagattatctcaaagcgtttagcaatccttctaggatagttattgtcatcctatttcagagaggaggaaaatcaggctcagagaggtggtgagcttgcagaaggtgacaaagctgctaagtgactgaaccagattcaaacatgaccctaaagcttgtgttcaaggtgtgcccccgctccaggccccagccacaggatctgcacagggtggggttctgaggacagagaatgaatgagccccacgcaggagctcccacctgcagcgacctcaccgtcccagcaggcgtggctgggagattcagctggacccggcgctctggggtcatccacccgacccctcgcagagcagtggcattgctgggttttgctttaggaaaaaactagaccttttgcagccaccaagcaaatagaactgtggctccctttcagtgtttagagctagttttacgtactcttgacagtttcaaaatagttttcccctggaaatggggagggagggggagatatgcactctaacccctggtgcttgtgctgggccacagatacagatacagcaggttccccgccctcagcgactcaaaggggagacaatcattcaacaaaaaaatcccaagtcctgcagcgagtggcctagggaggagctatgagagcccaagagaggacctggacctcctgacacacccagcagctggctgcttctccctgtgggaaaccagagtgaatgtgctttgaaagcaagagtctcccagagaagctgggtgcggtggctcacgcctgtaatgccagcggtttgggaggctgaggcgggaggatcacttgagcccaggagtttgagaccagcctgggaaacttggcaagagccagtctctacaaaaaacttaaaaattagatggtgtggtggcacacgcctgcagtcccagctacgcaggaggctgaggcaggaggatcacctaagcccagaagattgaggctgcagtgagccgtgttcactccatttcactccagcctgggcaataaagcaagaccctgtctctttaaaaaaaaaaaaaaaaaaaagtctccgagaaggagaggaaagctcggcttaaaggcgcttcaagtccaaggtgtgcggaggagctgggagggttgggaaaagatggtgcaggtttggggaggtaaggctgcacaactctcttctcacttagaaagcgttgcattcaacctccccattcagaagaaaggaagatagtccactgatccccttggaaggtccagggccctaggggtcccctattggcccagggctgacagccagaccaggccaggccagcccctcctctcgccgagttcccatttcctgttgagctgttggagccattcaggtcagcgcaggctggaggccaagcagaggggtcaccgctaactatatgctaatgacagcagggaccaatcaatcttcccttaatcaggcaatcaatgtgcactgcaggtgtgtcaaatcctggcctgcaactgagggagggggagtatagggggagccaggggcgtggaggagaagaagggaggagaggagcagagaaagggaagagaggttgcccaggtccccacccccgcccccacccccagctagtcacggccaagctcccagccccaccctcccctccatcccagagggagccggctgcaaattgaaatcactgctccgggaaagaaccaaggggaaaagagaaggaattaaaaaaaccagcgtctttttaatcaacgctcagagctgcagccgctaatgaattcaaggtactcgggaaccccagggcaaggctgggtggaaggaagccagaagcctcctcccccaccggcgctctcctccaggctccctcttagagcagggaggtgggggaggcggggaggggacctatggaaaccttcagactggagggacctccaggtgtgctggctcgacccctccctttagaggtgagctccagggccctgcaggggaagggtcgccaaaggtcacagccaggagaggggcttttactctgggcacctctccccctcaggctactctgctctctctcggcctagaggctgcacttaaaaaggtataagcttgtggaatgaatggcttgcataaagaaaaaagaccaaaaaattttatttaaaacaggtataggcaggtcccatcatcccagtctcctctctgaacagccctcttctctgcaccagctggagttattttttgcacacctactgtgtgccaggcttcagatacaatagcacactgaattgtcccagctgccctcacaggacccagctgctgtcatcatcctcattttgcagatgagaaagccgaggctccaacagcgttacagaatatgccaacagtttagccaagttagggtgggggcaggggcacatggactctggacctccaaatcctcttcccaagagccccacagtggtcctggccagaggctaggtctccccacagtgctgggaggtgccctggctcctcagcccctcctcaccaccccactgccttttccccttcatgcattcgctttggcttcagatcttatttaaccgaggagttccttcgctctccaagtgagaagctaccagcttatggcagttgtgacttagtccatgtttgttccctggaagcaagttcctggtgtctctgggctcagcaggagatgtgtggcatgacacccatgacaccagcccctcgcttcctcacaggcctgtcctaggcctcacttaaccctctcaacagatgggaacacggagacccagaggggttcattgacctgcccaaggtcacctagcaaaccagtggcaccatgagcgcttgagctckcgtgactctgctccagtcggtggtagcatagcccctgcgtgccgmcgtgtcctgcaaatctgagaatcccttcctcttccacctgttctttttgacacctctggagctgccagatcgggaggcaaaatgaaaagtgggtctgagaaggaacaggataaataatgctgcttcgggaatgcatggcctgggaaacacattcccagaacagctcatttcaaacattctgctgttgagagcttcgtgtagcggaaactgcaggcaaacgctgaggttcaaggccacacccaccaaggggaaagcgtgtgtctggcttgcatctccatcgtgcctgcctggctccctctgtcatgatctgcccattctctcccaccgcaggtacacacatgtgcacatgcatgcatgcacacacacacaacactgcagccttgccaagccccaggaacccaggctggggctgacctcagccctaaacctccaggtttcagaagcaaccgcactgagggtggctcaagtcaaaggaggtgggcttgtaaaggcgaaacagctcctggcataagggcaggaaagaccccaagtgtatctagggccttgagaggttgactaggaagcactcactgtatgttgatcgagatggcagccactagccactttgaattgaaactaagtccagccaggcgcagtggctcacgcctgtaatcccaacactttgggaggctgaggcgggtggatctcttgaggtcaggagttcaaggccagcctgaccaacatgatgaaactctgtctctactaaaaatacaaaaatttgtcaggcaggtgcctgtaatcccagctagtgaggaggctgaggcaggagaatcgattgaacctgggaggcagaggttgcagtgagctgaaatcacgccactgcactccagcctaggcaacaaagggagactccgtctcaaaaaacaaaactaagtccaatttaaatttatttcaagtaaataaagtttactgtccagttcctctgtggtactagttacatttcaagtactcagtagccacgtgtcataaaccaagaccgagcctaagagagctcacccccacctggccgccggtgcaaatgtagaacgttccactgggcagagaaagttccactgggcagcctgtatcctggagaccaggatgttcctctccatggggcgacttccctcatctaacagctggattcttctctttgctcctctggcatgtggcccagcatggcccctggctccagggctgccttgcaccctctgagctccccctccccctcaattcctcttggtcgaaatctcaagagagaaaccagtgcaggtgagcaccaggtgcaggtggctgtgccaggtgtcagggccatgcctgggaagctagggctgcaggcaggggggtttcctggggagggacatggctccagggcccagaacatggagaataagagtaagagagaaatggcactgtgcatgtaaatggcactctagagtgggggcatcccttgctgctgaagatcttgctattaccagcaactctaggatataggcactcttgatcacatttcacagataagaaaactgaagcttggggagggagagttaagtaacttatctaggattgcacagccattaatcaacaaactctcaagctcaagtttcctaaaatggttggtctgagagcaaggctgcctcaccagaaccaccagactggcaccagcctgggcttcccaggggcttcctgttcctggctctggtcttcttattgctttatcctcctatgaggagagaaggacccctaccactctgtcaaagtgacctcacccagatggcagtcaccctggtggcagataggccaccaggtccgagcgactatgggatgtccaactggttcttgcatgagccctagcctggagacaagtcagcttcctaggtgtgcagggcacagagaggatgaagatgaataggaagccatgtttctgctcatcccagagtcagagctccttgggcagtgtgtatccagggtagactgactgctaaaacaatcagctcccaaatctcagtgcgtcagcacagtaaaagcttccttcttgctgtgtcactgtccagcgcaggctcttgggaaggagcccgtactccacacagtcatccagggccccaggctccttaccatcctgggtggtggctccaccatcccccagggcaggagtcaacaagctttctccctaaaggaccagatgggaaatatcttaggcttctcaggccactcagtgacaactaatgatttctaccattgtggtgcaaaagcagccataaacaacctagaaatgaatgggcatgactgtgttccaataaagctttatttacaaatacaggcagagagttggatttggcctgtaagcctcagttttctgacccctgtcctagagccttggagttcctctctggaccctgtgcatctgatgagaagaccgggaaagagagagctatgggagattatgcaggaggtttggtgggggaacaggcctgaaagtggcatagatcccttccacccacatcccactggccagaactcagtgatgtggcctcatctcactgccaaggaagatgggaaatgtagttctttgtgtgcacaaggatctgagtggtcacctgctccctcctcctacctctggtccatacgacaatcactcccagataggaagcttcccccctcattctttggaagttttgacagtgagaatgctctcccagtatgctcctggagctattcctctcacccaaatatcgagttctgggagggctaagaagccccatagtggacaaagaatggctccatccaaggccttctaggggaaaccattagcctccagaaggtaggatggaacaattgctggaatcagccaccttgatctcaagaacaactcacygtgtggtcagctcattcattcagcagttattatactggggatataacagtgaaaaagacctacctgaaccttgctctcattcacccaaagacctctgttctttttaagttagctcccgatgtagcccttgctatgaactaggagctgagccaaggactttatgccattctcctttatcccccaacagccccaggaggaaagtccatggtagactttaaaaatggaactgatgcttcatccctccttgtattcacttctttgccgtgtgaatttgtagtttccttgcactctcactctggaatcctccaagaggcttccattgtccaatgggatgttagaaactaatacaagcaaaggctcaaaaatcatgtatgtaatggggctggctctcattcttgcacctctgtcatcgccaggataatacacccaggctaacctgatggaagatgaaagagacatggagcagaaccaagtcacccgagtcatcccagccaacagctggctgactctcaaacgtgggagtgagccgagccaatgcctacaaagctataagacccgtgatccttctcccctagctgactgcagatgcatgagaagcaaatgcttactgttgcaggccactagaatttggggttgtttgttatgcagcattattgtagcaacagataactaatatgctcttgttctctcccttttgaagatggaaaagctgagcctgagagatgttaattaatttgctcaaggtcttacagttggcaaatggtagagcctggatatgcccctgtatctctctagccactgtactctccactagagcacaagtttcatgagggctgctgtccccctgggttagtgtgttggaaatttaatccccaatgcaacagtgttgagaggtggggcctttaagaggtgattaggtcataggggctcttccactctttgtcttgcatgtgccctcctgcccttccacctatgggatgacatgacacagcaagaaggccttcaccagatgcagccccttgaccttggattgcccagtctccagactgtaaaaaagaaacctctgctttttatgaactacccagtctccagtattctggtatatcagcaaaaaatggaataagacaagggccaaagtttttgtctaaagacttgacaactgcttaactccactcaactatgatggtgtctggcattcagcaggtgtcaatatttgttgagtgggtgaaaggatcttgcttttgagttgcagtgactgagaggtccttctttctcgcaggaagcacatggggacgttgactcttccctcacagcagggagaagaggaagccactacaccagagatcaaaattctctccrgcaacaggagcctggaatcaaggcagacgctgggggcgcatttccactcaatcatgccctttgttctctagcagaccgggggaaaccgcggcagaatcaaagcacaaggagagaaagtttcttttaaaatcactgggctttttgacacgatgacagcccctctgggaaagatgtagggaagaggatgcagggtggagctcaggagggtgggaggggggggtctcagagcagaggggctgctacttggtacaggccaagatgagaccagttgaaaccaagaagctgcccagagggacctctctggggaytggagggggaaagaacttgaccaggcctttcataaatctttcttcccatccctgttcatcccaatcttgcaattccaagagctccccagaaagcccctgctctgcccagcattagcgttgagtgctgttcagaggagtgaacattgtctcactggctggagttttatacacacacacacatgcacgcacacacacagatccaggggaaaattgattttcacttattttccccaccatgcacccatgttccagcaaccttgtgattmtatcatgcttctacccttgttccttgtcagcattgatatatttccaattgagaaggaatgcagaaatgtataggcatgcatgtgcacccctcacccccctacacacgcacacatgtacacacatacacacacacacacacacacacatacacagaaacccatcctgtgggtcagtttggcttcctgggcaatctgatgttatccaaccacctgacaaagcaaagcagccaacaggtaagaggtgtctaagattcactgtctcctgaaaattccagagccccagccccacatgttcctcatgtctctgcaggagtctgagcggtgttcaggacactccagggtctttctaaaagcatagaagctggtgccatctattggctgggcccccaggatggggctgagccacagagcccttttctaattctctctctaaaagcttctatcacggactgactgtgccagtgtgtgttttatttatgactgtctaatccagtactcatcataacgcagggtgcacagcaggcagtgggtgtcaataagtgtttgtagaaattaatgtaatttgtaagtaatgagaatgttcttagaggcagaaaaataatgcagtgctctctgctctgtactgatttwaaaaaaaaaaawcttcctatccccaattcttctagcgctggttctttaggcgtacagcctcaacataagtaaacagcagagcgggactggtttcagaatgtgtgttgccattatgggtcactgctatgaatcagatggactgctggttaagaactagaccctgaggtcaggcagacctttgcttgaaccctagcyctcatgcatgtatggctttaggcaagttacctcgtccctctgagcctcctattataatggtggtaatcataggatctgctttcacagagttaccatgggttttcagtgagataaagcacaggaagtgcagcacagccccaacacagccttagtgctcattcacrgtggctgatgccactgctgctgatgttgatattcatgcagaattcaggcttggctctgctggaaggaggtaaaagaagcaagaactgggtcccctgagagctcacaactgagtggggagaaagagagcacttatggagaatatcttgaaaagcagcgcttgctaaacttggctccaagttcagtaggyggtcagaggagcaagaaggcagagtgggctgaagtggtcaagggaggcttcctggaagaggagaatctggagacaggctctaaaggatgggtcagatgagatgatggaaagtaggaagggcaaaaggcctggagctggaaggagcagtgggcagtgacctgcagagaggttccagacaagaggaatgagggtgggtgcacatcacaaatttggagacacaagattgatttgacttttgccataatgatggcattggggccrggtgcagtggctcatacctgtaatctcagcatcttgagaggccaaggcaggaggactgcttgagcccaggggttcatgactagccaggaaaacataaggagaccccatctctacaaaaaaaaaattagctgggcatgatggtacatgcctgtgccccagctacacaggaggctgaggcagagggatcacatgagcctaggaagttgaggctacagtgagcggtgatcgtgccactgcactccagcctgagtgagagcaagagtctgtcaaaaaaaaaaaaaatagaatgagttaacaaattgtggtagttatgtatagttcatgtgatggaatactacacagcaatgaaaaaaggatggcattcggagcatgttggtgggagagatgccgatgtttccctcatgagggaattagtgtttggtgactgcaataatktgaaaacaaaagtgcttcctccagtctggcagtgattgtctgacsaataaccttttgtgcaggcctcacctctcactctctgcctccctttccactgcttctttcctttctggactcagaattcctgaaggagtgggacaggcttccgctgagcacaggcactgaaaggacagctgccctcaccagtggttgtgcttcagcaccacggacagcwccccagacactcgccacacccttaggctcaaagtgccagtgacttccagggccccataaaagcacctgctaacccacccccaggagctggctgctgctctcccaccatgcccactctccaacctcctatgactttttttgtatcttttacttctcaaagctgaattctgtgttctaagacatcagctgatacacttgtctcattcatttcagtttgttgaggatcccgtctgtgccaggcaccatgtttatccactcatggaagtgggctatagaggacctctctggttgccactaaaatccattgtgtccaaggtctcctggaccccctgggtgcctttgccagagaagtgwctccgaagaagtgaaggtaggcacctggggagccagtcagtgggcagctgcactatcccagtgcccccaactcactcgttattgctaaaatagctgctgttgagggcacagggatgttgcrgcagccacggaagcaggctgtgatgtaatgattgcactgaaactacacacccccctgcaaggcggtgctgtggctatcaacacttgacaagtcagcccagagggatgaggccacattcctcaagccacacagctgagaagacacagagcaggactgcctgtgtttctgactccagacccctcactcctttttcccctccctctctctaggctcaaccacagagggtcctattaaattgaattgccattttcatgggtcagcaaatggctgaatatcagaagtgtcatgcgcctccacctagtattttctccactgagagcatctcttcccttgccaggaatgtgctacttcccacggcttccaggccactgggtctgggcaggggtgaccttctccaccctgggcaggctgggaagagcttctcctctaggggaactgcctgcccagaggtggccccactgaagcagcccagactgtgacccttgcagcagctaatgaacacaggtcacaaagagaaaagcagctttgtgaaataatccttgctctgggaggctgcctggcgagagctggcggcttcatcagaatgtttatggaggggaattaatcaggaaactcggtggagtcgcctgtggtggggaagactgaggaaggyggcrgagcttgggagggagggtgttccatctsagtaatcaatgctggaaattattctgtgaatatcaatggtctaaacatggcgtcaaggctggagggcaccagaaaacaagaaagggcagactgattgagtcctgcatggcccaataactgcccagcctctgcagctgcaaagaaggaaggctgttgcccttcattcactcacccactcattgattcttcctttcaatcaggagccaggcaggccctccaataggcaggaactttgctggttgctgggaccagtgcagtagtcacaagacagacatgaccctgccttcctggactagattgcaaagacatttagaatcaaactcagggattttgagcctttttataactttccaagttcctctaccctctctgacctctgtgcataatcattattgtttattgrgccttactgagagccaggcatggtgccattctctcagtaaatcctgacaatccatgtttggagtagacatcattattctgaagttacaaatgtggaataaggctcagagaggtcaaggaacttgcccaaggtccctgagttagccagtggccatatggatctcaaacccaggtcagtctgagtgcagagcctactctcttagccactctgacatactgtttctcaaacggagtgcaacttgtatatgctttgacccgactctccaattgccctggcttccccatcctccccacttccagctcacagccctaatgcctgttcctcttgattctccttaatccctcatgcctcttattcgctttgcggctggaggataattaggcaaaatgaaactatttaaggaaaactggagttctttgcagacactgagaggaaacctctgaaggctaagcttgtgggagtgactccagctgacggcacctcgtccttggcatctcagggctcctacccatgccttccctatactgtcctgagaattggccctaagtttcagatccatgctacgggcagggaacacagtgcaaggggacaggaagagtgctgaggatgtgatgtggtcacaccgtgtccttcagagaggcccttggtctcctctgagtctttttctttttttgagagagagtctcaccctttcgcccaggctgtagtacagtggtgcgatcttggctcactgcaacctccacctcctggattcaagcaattctcctgcctgagcctcccgagtagctgggactacaaatgcatgccaccacgcctggttaatttttgtatttttagtagaggcggggtttcatcatgttgaccaggctgatctcaaactcctgacctcaggtaatctgctcatctcagcttcccaaagtgctgagattacaggtgtgaaccacccaccgtgcctggcctcctctgagtcttgttctccccagttgttaacacaggcactaagctggctgacctgtaagccccttccagttctggctgtcggtggggggcctcctggctgctcttcactgtgggaccaaaagctacagcctcggtggggtggccctgggtgtgtcctttcccccttgctcccaccagtcttcccaagggcccaacagtcccatcagtcactcggcagtagttgcaaggcacctgccctggctggacatcatggatgcagcagggccatgacccaatccagttgggtcaggcctgttggaggtggggtctggtgggaggcgactggatcatgagagcagtttctaatggtttagcactatccgctgggtgctgttctcatgatatggagttctcaagacactggggtttttttatgaaaaaaaaaaaaagatttaattggcttacagttctgcgggctatacaggaagcatagcagcatgtgcttctagggaggcctcaggaagcttccaatcatagagaggaaggtgaagggggagcaggcgtctcacatggcagagtgggagcgagagagaaagggagggtgccacgtttttaaacaagagatctggttgtttaaaagtgtgttgggccagccacggtggctcacacctgtaatcccagcactttgggaagctgaggcaggcagatcacttgaggtcaggagttcgagaccagcctggccaacatagtaaaacaaaaattagccgggcatggtggcatgtgcctgtaatcccagctactggggaagctgaggcaggaaaatcacttgaacccaggaggcggaggttgcagtgagccaagatcgcaccactgcactccagcctgggcaacagagtgagactccatctaaaaaaaaaaaaaaagcgtgttgcacctccccttctctctcttcctcctgctcaggccatctaaaatctgcctacttccccttcaccttctgccttgattgtaagtttcctgaggtctccccagccacgcttcctgtacagcctgtggaactgtgagccaattaaacctcttttctttataaattacagtctcaagtatttcttaatagcagtgcaagaatagcctaggacagtgactttatttggaataagggtctttgcagatgtcattaaggtaaggctctgaagatgagatcatcctggattggagtggaccctaaacccgacgatagtgtccttttaagagactaaaaagaaaacagatgcatggagaaaagaattgtgtgaagacaggtagagattggagccatgcagccaaaagccaagcaagactagggattgccygaagccaggagaggcacgaaatagattctctctgagcctccagagggacccaaccctcccaacaccttgattttgaactctgggcctccagaactgtgagaggataaatttccattgttttaagcaaccgctttgtggtcatttgttacagcagccacgggaaactaacacaatgtccaaggccctgtcctggtctgaggcatcagggacagcaccctagaggaagcgacatttgatcagaagcctgaaagctaaaggaggtatatgagttagcagcagagagcattccaggctgaggaaatagcaggtgcaagggccccaaggcaggaaataggttctgaaggaaggaaagacccagaggactggcacattggggagggaggaggtaatgccagatgcttcttgagaggtgggcagaggaagacccccttccccagaggagtctgtactttctgctgaaagaataggatgctgcttccagcctggaatcagagaggtcagccccgtgggacctgagtctggctggtctctgcccttcccatgcctgcggctctggattaatactagctgatggacggatgggcttcgttgtgctgtgttcgaggagtgcagttcaccctgagtgtatctgtggtgtgctcactgcctcccaggaccgtgtgtcacccctccctgtctctgcgtccatcctgagtcctttgtcccatgtcagacaaccccttgcagtgtacctgtctcctcaacccccaattcctgtaccccaagcttgtcgtgttaacaggagacttcccttccctttgtcacccttccctttgtcatcctcagactgaattaaaatagcattgccacagagccgtatccgaggaattccgagtccccggtgacttcattagctccagcgccttgagtcattcgaaccacggtgctttcttgtcccgtcccctcctccctgcagagggggtcttattagctgggaaatatgaaccacttagtagttgcattaactcggtgcttccaacacgtttcatctctgcctttcttcccgccctgccctctcccgtgtctctgcctctctactcattagccggaggtgcctccactctggctttctccctggcactccatcgctctaccccttcccttcctcgtctctcacatctgtttcagaatcaaaggatgtgaacaccttcaaccagaacctcctcctttagggaatgcttaatgcccacgggctcggcctcccccacatggcatcaggaccctgcccacctcacctacaccaggtgcccagaggtgtccaggagcttctgaagtgggcatcatgcatgcccctacagcggtttcagccgcagcccccacatggcccctcaccctgctcccctttgctgtcctggcctctacccacagtccggacctggggtacttccctccgaccctggaagaatgtcagtgtccccaccaatggggccgctgccaggagctgccagacccccgtcccccacattccctggggatgcctccatggtcatctgggcccaacaggagcgtggctggagtgtggcctgctccaraggccaccagctgaccctcagccaccccacctctccctgccctccctctgggggtcagcagccatccatggccacctcacacactctcatgtgttctggtgtctcctgctcctacctcgtaaaaacctctctttatgctgggcrtgatggctcacacctgtaatcccagcattytgggaggccgaggcaggcagatcacttgaggctgggagttcaagaccaacctgggcaacatgtgagacctcaaataaaaaatattttaaaatargctgaccgtgatggctcacacctgtaatcccagcactttgtgagtccaaagtgggcaggtcaccagatgtcaggaattcgtgatcaccctggccaacatgtactaaaatacaaaatttagctgtacatgttggtgcatgcctgtaatcccagctacttgagaggctgaagcaggaaaattgcttgaacacggttggcggaggttgcagtgaaccaagatcacaccactgcactccagccttggtgacagagtaagactccatctcaaaaaaaattttttttagtaaaaaaataaaagaaattacccaggtgtggtggtgcatgcctgtaatcccagctacttgggaggctgaggcaggaggatcacttgagcctgggaggcagaagctgcagtgagccatgatcacaccactgcactccagcctgcgtgacggaacaagaccctttctcaaaaaacaaaaacaaaaataaaaaaaccctctctctcctcccagttctcctgagaaggctgcagtgggcatggctagggtgtcacagaccctgccgtgtggggaaggggctactgtcacagcaaccagcatagcctggaaggacatcagtgctcatgcagagagagagggaaaacagaccaagacccaggtggggtcccggaggctgaagggggtgtcaggccgctgttggtctcaggggagccttccctgtcactcccacttctgggctcgtgcctccaactgggttgaatgtaaccaactttcactgggcattccttgtgccaggccctgtgctaggctctgggcatttgggggcgaaacgtcgagagagagatcataagtaaacagtacaagggagggaggggccggagcctagtcctgcagcccgacagcctctgttctccaaacaccaagtgggcctctgtgcttggagcctggggagaacactggggcaccctctcctttccctcaaggggttcgagggtggcacagcaggcacagactccaggcgtctgccacggtggcgctcagcatgctggaaggtggggctgggttggaggggcctgggtcagattcttgcctctgcggcttacaagctgcatgaccttgggcagactgtttcactctcaggacctcwgttttggcatttctaaaatggratgatagcatgcgccccaccgtgttgcagtgaggatagaatgcagccactcgcccagggccatggctcagtgcccggcacgcagtaagcaygcagcaagctcttggtgacagttaccatcacagtggcattcgtgggaagtggggataggggcttgtatgcgggcargaaggaggggaaactggccctgagtggagtaccatgaaggagctggcatttggactgggctcaggaggacccggaagcttgcattaaggaaaaagcatttgtgtcccaggcctctggacctgctggtcagcactatgaacctgagcaccgtggcctgtgccctccacygccgtgcacgctcactgagttcctggtgggtgctggtagccagggctgccaagctgcacaagtccaaggggggccattcacacagaagctgaggtggaaggagcccccggggctctgtgacgcagcagccctgcctcggcccgcactggctgggcactgaggacacggcaaccagcagaccagcccctgcactcatggagagccaggaccgtgcgctgacaggatgggagacccgtggccagcaagccctacagccacagtgcagaacctcccaggcctgggtcctttccaggtgtcgagtgctccggggccccgcaggctcctgcctctccctgcagaaatcgctgctggtcctgcattgtggttggaaggtcccagcggatcagggaagtaatgagcaagcttgccctccccaccgcttagcccacggctctgccaggccaattaagctgcctgctgatcacctgcgcaggggagagcccagccggggttggctgaagtaaaatgatctccgtgctccattgtagagaggagagctgtcgccccaaatccagctcacatacttgtgccttctgggtcaggtttgctttgcagaaacatggttctgcagcagaacctcatgaggggttgcaaactgctgcagagtgcaagtatccattcattcattctttcattcattcattcatccagcaaatgctggttgagaggcccagggtgtcaggttctgcacacagacaagggggacacaggccttgcgtgggtctcacttcagttggggagctctgtgaaggagctggcacaggggctgggatttggaggggtcagggagtaaattggagaggatgctggaaggtgattctccagggagagaagaatgccagtggatggatccagagggaagcatggggcagagggcacagcggccctcctggcttcgtgtattcaggtgctaggcccactgtaacacgttacctcaaactgtgtggcttaactcaacctccatttcttcactgttcagaaggccaaaagtcctaggccaaggcaggcggatcacatgaggccaggagttcaagaccagccttgccaacatggcgaaaacctgtctctactaaaaatacaaaaatcagccgggcatggtggcacatgcctgtaatcccagctacttgggaggctaacgcgggaggattgcttgagccccggaggttgcagtgagccragatcatgtcagtgcactccagcctgggtgacagagtgagattctctctcaaaaaaaaaaaaaaaaaaaaaaaagccgcamgtctaaaatcaaggcgttggcaagcaggttcctcctggaggcactgagggaggatccgttccagcctctgctctccrgtggctggggtgtgtctcaactcatgattgcacccctcccatctctagctctgtctccccgctgctgtcttcccttagtgtctctgtttcttcttttttgtcatcaggacaccagccgttggattcagggaccgctctaatccagtagagcttcattttaatttaaccaatgacaccagcaaagactgtacttccaaataaggtcatagccacaagggtgaggacttcacttggggttaggacttgaacttttctttggggagccaccgctcaagccatggcactttggtattcttgagtgtggtctcagcctgagtctggctgagacttgacgctgatcctaactctcttgcctccttggggagcccaggacggtgcagtgttgtggggtcccagagcaggaaggtagcatcatgcagcaggaggcaccagagaaactgttgggccgtttcttacacagttcagccatagagctccacatcagtccctcctgtctaaatgcggtcaccggtcttgggcctccctgactctcccagtaggaaccaagggaaatactgactgccaaaggagccaaaaccccaggccacattggggtcccccacagagcccggacccagagaaggcatctggggtgctccagagaaaacccccacaggccagagtgtctgacctggctgggcacaactgaccccacctccagactgcccagcactcccaccttccccaaagcctctttatttttttcccccacctgcctgtggttttctcacccccaggcctggagtgycctctctctggcccctctctgtttcgtggataaccccaattcatgctccaggactccattcagcaccagtggaatagctacaatcccaaagaccaacatcaccaaatgttggtaaggatgtggagcaaccggaacttgcatgcatcctgcaggagcgtaagattacacgccttcagtggagaactgctgggcagtttcttacatggttaagcatctacctaccctatagcccagcaactccactcctaggtatttagtcaagggaaatgcacacacatgttcacaaaaagacttgcttaggaatgatcatagcagctttgtttatattgactagaaactaggaataactccaaatgtccatctacagacaaatggttaaaccaagtgtggtgcatccttattatggggtatagaaagggacaagctcctggttcacaccacaacatggatgactcttgagatgtgctcagtgagtatgcatggttcattcaaaggaaatcccaggccgggcacagtgactcccacctgtaaccccagcactttctgaggccaattgaggatcacttgaggccaggagttcaagaccagcctgggcaatgtagtggggccccatctccacctccaaaatttttttttaaatagctaagtgtggtagtgtgtgcctgtagtcccagctactcaagaggctgaagtgagaggatagcttgagcatgggagttcgaggtttcagtgagccaaggttacataccactacactccagcctgggtggcagagcaagaccctgtcaaaaaaaaaagaaggaaggaaggaaggaacggaagcaagcaaggcaaccaagaaagggagggagggaaggaaggaagggaggggagagagagaaaaagaaagagaaagaagggagggagggaaggaaggaaggggagagagagaaaaaggaagaaagaaaagaaagaaagaaagaaaaagaaagaggaaagaaaggaaagtaagaaagaaggaagaaagaaagaaggaaagaaagaaagaaggaaagaaaaaagaaagaaagaaagagaaagaaagaaaagaaagaaattcctagggcagacaaaagtgatctatggtattaaaaatcagaacagcagaggagggtattgactagacagtgacggaaatggtctatgtcttgttctgggagggagttacaggggtatatacaacttgctgaaaagaacacctgtgacctgggcattttactgtgccttaatcatacctccattgtacatgtgtgtatctgtatgtatgcacatgtgtgtatggtatgaaaagacccccccaaccctggcctcactcctccagagagtccttcycacacccaccccaagctgagtcgggggctcctccttcacgctcccccagtgagcatctcttcctgcacctgctggctcgaacccacctgtccagctgctcggcatccccagcaggacaccctttgtggctataggtggctgctgtgccttttcatctgcatgtccctgagcccagcctccctcctgaggctgagatgtttactgaatggacaaatgaggaaatgattgccacatctttatatttacagctgtagctgcagcccagatacctgtttgtatctayaaactccatttcgacctcctatttatgcctgtctctattaaatctacagagattcataaacgcaatgtctaacatgcccgtcactcgctgtcagctgtgctgagctcccggaggtgctcrtggaaggtgtaagcactggtcagcccacaggtcctcggggctcccgtgaagtgacaggtcagcagtctccaccaggcttcccgccagrcttgcccccttctctttgtcatgtttcttctcccctccctcctccgactmaggtgtgtgtgtccccctccgactcaggcgttacgtagagttcaggctcagaaatgagacagttgtgttcgatttctgactctgctttgtgaccttgagcaagtcacttaccctctccagacctcagtttatttatctgtgaaatgggtcatactcatgcctgctttgttgaggagtcagtggggccaggggaggttttgtgcgtaaagcactgagcctggtgcttcagaggaatggacccatcagacagaccctgcgtggccccagaggtttcacaagttaagtgggtcccccagcacagagttagttcatccatccccaccccaccccctgcgcccgggcagcctccarggtacttctcagctgcaaagagtattttcagctcagaccatacagccctaggctaatttgaaaatgaggctcctagcgggatcccaaataccagggatgagctgcagggaggggcagacattagcttcggaaagcagattagagaaggaagccccccgacagcaggaaagagcagaaatcagggctttgaaaagaaaatggccaaatgcagagtgtgaaaccattctgggccgagggggagaactcaccctgaatgtggtgagggtcgcctctctttcccaacgaggactacaacgccaaggccgttactttagcagggccctcagtccacggcctggcctcgggaacacagatcatgtcacctggcactgaggaggggcagagaggtggcatcgccagcccacaaacccaggacccacagttgtctcccaggctccaccctttcctggctgtgtgacctcgagtaaggcactaaacatctctgaggttcatttcctcctcaggaaatggtaagtacaaggcctccctcccacccaacaccacgaggatgctgtctccgtgtctgcctgatcccgggtccctccccaaggtctggcacaagcaggaggcttgctacagacttggtaaagagtgaaagacagtcccagccagaccatcctcttcactgacaaggagggtggggaaactgaggcacagaagagttgcttagggtgactggtcataagaggagcacagagatgtaatgtcagattttagccagacgtttggggcaaggtccctgtgggggccttgttttcactcccttttgaccctccaaagcccccatatgtgcagatctccttacctaagaatgacaccggaaatgctggcatcagaaatgagaaactgtaggaaaatacaaagaaagaagaaaaatcacctgaatcccaccatccyaaggcacctgctggtgatattccagagcacgccttcctgccgtccttccaggcacctgttcatgaatggccttgtgggtacagttttacctgcccacaggtaaaactgtgggatcacacctgtaatcccagcactttgggaggccaaggtgggtggacttgagcccaggagtttgagaccagcctgagcaacatgatgaaaccccatctccacaaaaaattagctaggcatggtgatgcgtgcctgtagtcccagctattcaggaggctgaggtgggaggaacacctgggccaggaggttgaggctgcagtgagccaagattgtgccattgcactccagcctgggtgacagaccttgtctctaaataaatacatgttttaaaatgtacctccaacatcatttttactggctatgtaagaatccattgtatggatggattctgacagaatcaatcaatctccagttggggtagagagctaacgattggtgttttttttcactggaaacaagtgaccggacaggcagacatccaacttctctgaaccatccctggtgacaggggcttgctattcacaagagagtcacattccaactgcaggcagctccagggttaggaaatccttcctgaggtcgagcctgaatctgcctcccaagcccttcctcacactggtgtcaattcaattctgcacttagggtgacacacactgtctatccctcagcctcggtctcctggtctccaccccaaaaccaaacctcacacccatcttattttttttttttttttttgagacagagtctcactctgtcacgcaggctggagtgcagtgacacaatcacagctcatttcagccttggcttcctgggctcaggcaattctcccaccttagtctcccaagtagctgggactgcaggtgcacatgccaccacacctggctaattttttgtatttttgttgttgttgtaaagagacagggtttcaccatgttgcccaggctggtcttgaactcctgggctcaagtgatcctcccactatggcctcccaaagtgctggtattacaggcatgagccactgcacccagcccacacacccatctttttgatctcttggttggagagagaggtgccttccccactggcacgggcaagcctcccagggccacagcggggtatgagatttgcagatttagaaagaatgagctttggctttagagccagacattcctaggttcaaagtccggcttcaccatttcctggctatgcgacctggggaaggcacttgacctcgctgagcctcagtttcctcatctgtaaaataggtttaatcaccaacctcatgtcacaaaaatgtcaggggggcttatttgtaaaccacttagtttaggacaagctgatgataaagacttaaatggtagaaaatgatactccagacagcagggagatgctctccatgaggatccaggtgacaggcccagtggggatctgggagcctcatggagacgagacatcccagccctgccccctctgccccctgtcaaaggcctgtgacaagctaatccctcatggaggggagggctccaggaccaggaggggcggctcggcgaggagggagggctaaagacttacagagcgatcaatacattatttaacagcaagaatgcaaatgaggaaaattaatgaaggcgctgtctcagcccctgcctccccatcccccactgttcttgacttcggattgctgacaaattctctagaaaatatcaaaacagcctccggctggaacctgccacagtgatgcaccattatctattattgatgtaaaccttgacaagttctctttttaaggaagacaagcacgagagagagctgctaatctgtgtttaaagggatagactgtcatttcccttccccagggctgccgggccactggagcgcctgcaaactgcaggccctctgcctgccctgtcattktcggtagctggagggacccagtcctaaccagaacagggagggagacctggaaacagcaatgggaggtcagggccgggggagtggggtggtattttgtgcccctcaccagctttcccttggatgtgcctcagtttccctctttatgctctttccaaggccagctattttatggyataaccttgcgggcaaggtaggagtcgtgctgaaaccagagagctctgacccctgcctcagtcatctgaagtgtttttaggccagtgaaactctgtatgatgctacagtggtggatctgtgtcattagacatttgtccagatgcacagggtgcccaacatcaggagagaactctatgtaaactgcagacaccgggtggcaaygatgtgtcaacagaggttcatccattgtaactgatgtcccgctctgatgggggatgttaatagaggggaggcagtgcaggtgcaggggtatatgagagtatatgagaaatctctgtacctttcactcagtttttctgtgaacctaaaacttctctaaaaaataaagtctgtttttctaaaaatccttgaggctgggcacagcagctcatgcctgtaatcctagcactttgggaaaccaaggcaggagcataacttgagcccaggagtccaagaccagcctggacaacacagggagacccccccatctctacaaaaaaaatccaaaaattagccagccttggtggcacacagctgtgcttccagatactcgggagactgaggtaggaggagcatttgaacccaggagatgaaagcttcagtgagctatgattgcatcactgcaccccaacctgggcaacagagtgagatcctgtctcaaaaacaaacaaacaaacaaacaaacaaacaaaaccaacggcccaaaagttccttcagctgatacacaacttcagcacagtttcaggatacaaagtcaatgtacaaaaatcactagcattcctctatacaagcgatagccaagccaagagccaaatcaggaaggcaatcccattcacaatcgccacagaaagaataaaatacttaggaatacagctaacctgggaggtaaaagatctctacaatgagaattacaaaacactgctccaagaaatcagagaagacacaaacaaatgggaaaacatcctatgctcctggataggaaataaatatcattaaaatggtcatactgcccaaagcaatttacagattcaatgctattcctatcaaactaccaatgacagtattcacagmactagaaaaaaaactactttaaaattcatatggaaggaaaaaagagcctgaacagccaaggaaatcctaagcaaaaagagcaaagctggagacatcatattacccaacttcaaagtatactrcagggctacactaaccaaaacagcatggtaccagtacaaaatcaggcacatagaccaatggagcagaatagagagcccagaaataaggctgtacacttaggaccatctgatctttgacaaagctgacaaaaacaagcaatggggaaaagactccctattcaataaatggtgcttggwtaactgggtagccatatgcagaagattgaaactggaccccttcctcacaccatacacaaaaatcaaatcaagatggaataaccacttaaatgtaaaacccaaaactatacaaaccctggaagacaatccaggcaataccatcctggacataggaatgggcaaatatttcatggcaaagacaccaaaagcaatcgccacaaaagcaaaaattggcaagtaggatctaattaagcttaagagcttctgcacaacaaaacaaactaacaacagagtaaacaggcaacccacagaatgggaaaamctatttgcaaactatgtatctgacaaaggtctgatatccaacatctataaggaacttaaacaaatttacaagggaaaagcaaccccattaaaaagtgggcaaagtaaggtctttggggaacagggatgcttatttcctctgccttccttgtctgcctacacggatacctacgtctyttccctttgagatacatctcacgcacatgctgaagagttgtctttcttgacataggccagaggcattgatgtgcagcaggtttctttagtcaaccatgaccttcccaccaacagggaaaactatatccacagaatcagtcgagrtggatggtttggccgtaagggtgtggctattaacrtggtgacagaagaagacaaggggacttttcaaaacatcgagaacttctacaacacttccattgaggaaattcccctcaatgttcctgacctcatctgaggggctgtcctgctccctagccccagccagggttcaatcttggagggctgaggagcagcaggagaggggaaggaaaggagccaagggatggacgtcttgtcattttttttctttgaataaatatcattttttgaggcaaaagaaaaaaaagtaggcaaaggacaygaacagacactttccaaaagaagacatacatgcagccaacaagcatatgaaaaaaagactcagtatcactgatcattagaaaaatgcaagtcaaaaccaccgtgagataccatctcacaccaatcagaatggctgtgattaaaaagtcaaaaaataacagatgctggtgaggttgtggagaaaagggaatctttatacactgttggtgttaattagttcaacccttgtggaaaacagtgtggcaattcctcaaagagctaaaaacagaactaccattcaacccagccatcctactactggatatatacccaaaggaatataagtcattctaccataaagacatgtgcgtgcaaacgttcatttcagcactcttcacaatagcaaagacatggaaccaactcgaatgcttatcaatgacaaattggatcaagaaaatgtggtacctggtcgggcattgtggctcacacctgtaatcccagcactttaggaggctgaggcgggcagatcacttgaggccaggagttcgagactagcctggccaacatggtgaaaccctgtctctacttaaaaaaaaaaaaaaaacgtagccaggcatggttagcaggtgcctgtaatcccagctccttgggaggctgaggcaggagaattgtttgaacccgggaggcggaggctgcagtgagccgagattatgccattgcaacactccctattaccacaccctcttgtttctctcctttacatgacctgtccacccccataaaggcattcatgcttgtgacccctgggttatatgctctcaaaaatttcagttatgtgcactgtgatcatcagctataaaccagcaatgaatctgtggtctctcatttctcaatgatgccatttctctgaagcacttttcataacggctttaaatttaagcaagttagatttgcttaatgtctaactcctttgtcaaaacacaagtcccatgagggtgtgtgccccacactagatggcccaagctggttctactgctacagttctcacagccgcttcttatacaccctctatcctgcttctggtctcgctggctgtggtccagttgtgctgtttacaaagtctcctctccacgaagtccctcttcactgcttccagccttccaggggagcaaaaaagaaaacccatgcttcttagaaatgagtctcaaatgagactcaatgactcatagggagctctcctgtggatcaagttcatgaactttcatgcaagagttttgaaaccttgaaagccctccttccaagagttggtggttttttttttctattgatttgcctgatgtgtttcagttagttgcatttcttcttttttttttttttaacttttattttaggttagggggtacatgtgaaggtttgttttcttaggtaaactcgtgtcacaggggtttgttgtacaaattactaaatcaaccaggtatgaagcccagcacccaacagttatcttttctgctcctctccctccgcccaccctctaccctcaagtagacctcagtgtctgtttttcccttctttgtgttcatgagttctcatcatttaactcccacttataagtgagaacatgtggtatttggttacccttagtttgctaagtataatagtctccagctccacccatgttcccgcaaaagacatgttcttttttaatggctgcgtcatattccgtggtgtatatgtgccatattttctttttcttttcttttttttttttgggcgggggcgcggcagagttttgctcttgtcgcccaggctggagtggcactatcacggctcactgcagccttgacctcccaggcactcaagtgatcctctcacctcagcctcccaagtagctgggactacaggtgcgcaccaccatgctcagctaatttttgcatttctcatagagacagggcttcaccatgttgcccaggctgcccgggcgctggggtcacagccatgagccaccacgctcagctgatatttcccaattttcaaacactgttaactaattcttactttctaaaaccgtggcacaggccaaacaatacctgtctgcaggctgactgcaacctgagaaccacagtatgcaacctctcatctttgctgatgaggaaactgaggcctggagaagtttgccgacgtctgtgatcagctgcccagctctgcgggctttaaacagtttagtactttttccagatcaagcaacaggagtttggatctgggacgcatcataagaacatcaacctgggctgggcgcagtggcacacacctgtaatcccagcactttgggaggccaagagggggctgatcacttgaggtcaggagttcaaggccagcctggccaacatgtcaaaacccatctccaccaaaaatacaaaaattagccaggcatggtggaaaacacctgtaatcccagctacttgggaggctgaggcaggatactcgcttgaacctgggatggggaggttgcagtgagccgagatcgtgccattgcactccagcctgggcgacagagtgagactccatctcagaaaaaaaaaaaaagaacactaaccaggtatgggtcctcacaacacatctggtttattctcagccctctgcacactctgtctcatcagactttcacaagagtgcaacggggtgaggattgctcttccccttttatcagtgaggaaatagagactcagaggggtcaagcagtttctcagggtcacacatctgcaaaagcagcagagccagactgagggcacctgtgaagccacggggtcccataccaggaacctacagtgtatcgcctcactataaaatggaaacaaaggccaggcacaatggctcatgcctgtaataccaatgctgtgagaggccaagatgagaggatcacttgaacctaggagttcgggactaggctggacaatgtagcaagacctcatctctacagaaaatttaaaaattagccaggcatggtggtgcatgcctgtggtcccagctcctcaggaggttgaggtgggaggattgcttgagcccaggagagtgtggctgcagtaagtcatgattgtgccactgcactcctgcctgggcaacagagtgagaccctgtctcaaaaaaagaaaaagaaaataaagagcgagaggcaaatccaaagttgcatagttgttctatttgtttcccattgctgccctaacaaattcccacaaactcagtagcttaaaacaacacgaatgtgttacagttctggaggtcaaaagtcctaaaatcgaggtgtcggcaagactgcattccttctggagcctctagggaggaatctgttccttgccttctaccgcttctacaggccgcctgcattccttggctcctggccccttcttccatctctgaagccagcagcatagcctcttcctgtctctctctttctgacctctgcttccattgtcacacctccttctctggctctgacctttgtgattccatcgggctcactcagataatccaggatcatctccccacctcaaaacccttgatttaatcacatctgcaaagtctcttttgccacgtcagggaacacattcgaagattccagggattaggacaggaacatcttggtggggagcatagttttgtctcccacagctgtcttccctgcaaagactacacttgtcaccagtgagtggagaggggtgggaaaaaaccaatgacagaaggttccataagaaagctcagacttcactgagaggccatgagaagcccatgaaggaagcaaatccccctttcgctccctaggagcagctcagggaaagctggggcagaggcactgacacccaatcaggctgacctcatgccagtgtcagggtgaggcccttttttttttttttttctgagaaggaatcttactctgtcacccaggctggagtgcagtggtataatctgagctcactgaaacctctgcctcccaggttcaagcgatcctcctgcctcagcctcccaagtagctgggattacaggcatgcactaccacgccaggctaatttttgtatttttagcagagatgggatttctctatgttagctaggctggtcttgaccccctgacctcaaatgagctacctgcctcagcctaccaaagtgctgggattacaggcacgtaccactttgcctggcccctttgtcatcttttatcccctaccagcctaataaggtcactccctgggaaggagtgctgggatctagaacccagcattccctgtttgaacaggcatccctgcatgaggtctagggagctgacacactgcatctatgtctagcttcatggccctggagagctgcaagaactccaggggcagcgggcacccagctgcccctcaagctgctgagcctatcagaaggacactgcactgtttcctccattcactccttcacccaagataagttgatcaggcaactactctggggcaggccctgtgccaggcactcagatgcagctggaaaagaggcagatggggcccatgcccttgtaggactggtggtttggcaagagttaggtgttaagcacataatcatttaattgcagatgtgaaaagtgttcagacaacatggcatctttgagaaaagagaggcctcatatggtgcattttctttccttttcttgagacacggtcttgttttttacccaagctggagtgcagtggcacgaacacagctcacagcagcctcaacctctggggtgcaagggatcctctggcttcagcctccacaagtagctggcaccatcacactccactaatttttgtattttttgtagagacgaggtttcaccttgttgcccaggctggtctcaaacttctgggctcaagcaattctcctgccttggcctcccaaaatgctgagactrcaggtgtgagccactgtgccctggcgtatggtgcattttctagataactgaaggtacctccttgaaggaatgaaatataagtggctggaagaggaagaagagggagaaaatcaagtctctctgaaatgcaccgcttatgttytcagttatcagtttcatggtgcagcctttgacctgatgcattcctgctctgggctgtgaggtgcttctactgttttgggctctctctgtttttttgtgtgtgtgttgttgttgttgttttcttttttcttcttctttcttttttttttttttttttttttttgagacgtagtctctctctgtctcccaggctagagtgcagtggcacaatctcagctcactgcaactaccgcctcccaggttcaagcaatttccctgcctcagcctcccaagcagctgggattacaggtgcacatcaccatgcctggctaatttttgtatttttagtagagaaggggtttcaccatgttggacaggctggtctcgaacccctgacttcagttgactcacccgcctcggcctcccaaagtactgtgattataggcatgagccactgcgcctgacctctctggtttggtgtcacatccctttcctcacagtctgaccattggtaccacttctcccrggggaagggacttggctctcggagtgtcacctctgctgttccgctactgcacatcctatgactggtcaccagaaggccaggtgggaaacgtgtacagtccctcccctctggggtggggactccaggcccaagcttcaccatgaacccaggcctggagtctctcagagcctgggagctgtccagggtcctgcaccgcttgaggcctgaggttcacatcccggcctgcccaatggtggattgtgaggccctgggcaagtcctaccctatttccgagccccaggctccccgtctgaaagatgggcaggacagatcagatggtctccagggctcctgctggctgccttcttagatcctttatatcccaaaaggattgtcatgggtcttgggctcttttctggactggacagacgacacttgaaggacagggggtcagcaccaagtacagatctgggcagagtggatgtcccacaaaaatattggcataaagagccagcaagcctgc

SEQ ID NO: 93485 - DNA, 29239 bp, Homo sapiens
gagaagtattcctggaagaagctgattttgaaacaatcctggaaccaatggaaagagaaagaaactttccaataaagaggggacaatttagggaaaattgttacattatagggaaaatagggggagggcactaaggcaggaaatagtgagtcatagatgggggaggagttagaaggttacaatgtggggtaccacagtcatcagggggattcttcaccaccgcagaaaggcaagtctgtggtgcgtggactcgcctggaaatcagagcacaccaaatatgactcaagaccaggttagattctgggaagataaatagggcaatgaaatgttctcatgcagcattagtaaaataagacccacagcaaaaaaagaaaagaagaccaaataccacaatgaaaagtcctgagcatggcattgggtgctcccttccaactgaagcataaaatttcaaccacattgctttcccagagccactgcaaccactgggttcatcaaatccaattcctccttttggtggtcaaaaaattgaaaccacagagatgcactgacgtagagaaacctgaggccatctgtcccaattttctgagatgctgctagactttgtagcacttttttctgctgcaggagctcaaagcccttttgaaaatacattaatatcacagaggatatgcttctagcaacaggaagggcctttaacaaagaaaaggcacactgtcccccttcaaagtattttactgggaggttatatacttagtcccagctgctagtgcttagggatatatcgtttctttaacttttttttttttttttttttttttgagacagtgtcttccaggctggagtgaagtggtatgatctcagctcactgcaacctccacccccccatggctcaagcaaacctcccacctcagcttgccgaagtgctgggattacaggtgtgagccatcacgcctgacacattttttctttattcctaaaattcattgaatctttatcctttaagatgaatgattgtgtgaaatagcttaaagtcctttgttcctaattacagtgattaaagtagtgatcagacacggtataataccatttttaaataataaactaaataaactggacatggtggcttatgcctataatcccaacactttgggaggtcaaggtgggagtatcgcttgaggccaggagctcaagaccagcctgggcaacacagcaagaccttgtatctagaaacaaactttaaaaattagcccagtaggccgggtgcggtggctcactgctgtaatcccagcactctgagaggctgaggtgggcagatcacctgaggccaggagttcgagaccagcctggccaacatagtgaaaccccctctctactaaaaatacaaaaattagctgagtgtggtgatgggcggctgtaatcccagctacttgggattacaattgtcctgctgaggcaggagaattgcttgaatccaggaggtggaggttgtggtgaacagagatggtgccactgcactccatcctaggcaacagaacaagactccattgaaaacaaacaaacaaacaaaaaacaaacaacaaaacaaacaaaaacaaacaaacaaaaaaccatagcccagtatggtgacatgtgcctgtggtcccaactacttaggaggctgaggcaggcagatccctagagcccaggaggttgaggctacagtgagctataattgtgccatccagcctgggtgacagagtgataaataaactaaataggtaaactcaataaacacataaactaaataaattgatttcctcacttggttccttatggaggctcttcatagacagctgtcaacctcttactgtgttggacactgaaagaggaatggatggtttccatggtccctgctgtcaagaagcgtacattagaagggaatacttactcaagcaaacatgcttcattaccagcaaaagtgaaatactatgacatgtgagaagaaagcaagccatctttttgatttgaagaataaggaaaagcatcataggaaaagtagcatcttagttggccgttggaggaaaaacagaattttaataaggaaagaaaggcataaaaagagcaatccaagctgaataagaataacaaagtcatggagatgtgaaagtgcagggtaagttcaggaaataggaaactgctgtgtggttaaagcaatgggcacgtgggagatggtggtggaagatgcaacccgatcaggcaggagcacaaacatcagactctggattgcatcagacccaggagagtgttttcagtcagattttcaacaatgacagccttgttagaataagtgggtggcttcccctgataactactttgaaggacaacattcactgaggtgcttaagttctaggactgcttaaaaccaaatcaggtcccattgcttgataattacagctgataaaatcatgtctctgtacaggaaaatttagcaccaattagttaaatcatcaggcttcagagcagagtcatcagcaaagccacaaaggaggaagaggcttagtcctgctgggcagtctggcaaatgaagttactaagtataaacataaagtcttccaggcactccccttgggaaaatctgtttctcgcttgggggaactggagaggtctctcctaggatcaggagttacaggggatgaggatggtgggggtaggggtgcatggactgagtttgggaaggacctagcatcgtggagtgctcaggtgcaaaggagagaaatcaggaaagaagcccagtttatctctagcaccaaggtaagatggaaatggtgggggcactgaaggaagattgcaacttgttcagcctctgggtgcccaacatgcataccaaagcctcaagatagagcacccatgacagcacaactaattccaaatgctacaagcttgtggttcaaggctaccaataaaatacccttagtcccacccacaaagtttctaatttagtgagctaaattagacctgagatgggctgagaatttgattttctaagaacttctgaggtggtgctgatgctgctagtctaagaacctccgacctagaacttatgaaccacagccctcaggtgacatgtttagtagctgaatctgagagaaactgcaaagggtaggagttgacagtttccagctcagactacctgagggggatctgtatgctccagagactgataaacatcaaaacaagcaacaatccaagacagatagtgatcatgcaataaaaagaaggcagaaagggaaggttaaaggaaggaagcagagaaggaatctgggccatttgcctggagacaaccacccagtagagcagaaaggagctgcatcactagccagtcactcggaagctacagctctgttgtcacctggctgcatctagaatcatctacggagctttccaaaaatgccaggtgctaagcctcacccccccaaacaaattaaatcagaatcctacagatggggctctgactgtgggagtttctgaaagctcccagatgattcaaacgtgcaattagggttgagagtcgctgttctaagggaaatttgatcctgtttaaagaaagaaagaaagaaaaaatccaatagagaaatctgtggaagaagcagtctatctctacttaacttaaaatgtaacaagatttctaaagtgattgctcctcaccttcttactctatccttcccaaaccttcaaattcgtttacagctgtggatacatccagcactgtgcctgagcagtttctttcttatttatttatttatttatttatttatttatttatttattttaaaataaagatgaggtcttgctatgttgcccaggctggcctcaaactcctaggccaagcgaacctcttgcctcagtcttccaagtactggaattacaggtgtgagccattgttctcagcctatggagcagcttctgtgctgttgtgctcccccatgctttgcttactgtggatcatgattacggattatggttaacagcagtcaaacaagccttgtagctgaaaatattgaaagaggccttctcctagggctcactctcttcctgtctctcggaggtctgacaccaagacaaatggtttttgtctctgcatagctacaaatctatggatcatttattttatattagattaaaaatgtgagcttaagagtcaatgctgccaagcatggtgcctcatgcctgtaatcccagcaactctggaagcagaaggatctcttgagcccaggaggtcaaggctgcagtgagctatgatcacaccactgcactacagcctgggtgacaaagtgagaccctgtctctaaaaacatttaaaagagtaaaagtaaaaaagrgtcaatgcccttacaaaagagatttctagagcatctagtcaaattttatatatctatgtctgagcatactgaagaataagtgaaatgttatatgaaactgcaatatataaatagataaaaagaagcattatagaactgtgtatgatgttattatttgtgttaataaaagaaagaggtggggcaatatgggggaatatctccaaaaatatagataatagattgtgacattggtttactctaatgtggggcagattagtgaggagactttttgctatgtgctcttttctacctcttgaattttgaatcacttacatggattacctattcaaaaataaaattttttgaattaactttttatagtggggcctgttctggttaaaacagtctggaccttccttttcaacctcttcccctcatcccaagccctcacacccagacaaagatccatgaagatttctaaacccatgatgttcctcagacgacgcctcccccacatggggtttggtggagaactgctaaaccatttcactcccacatttttgttttcttattttttgtaatgacaggtctcactatgttgccaagcctggtctcgaactcctggcctcaagcaatcctccctccttggcctcccaaagtgctgggattataggggtaagccaccacatctggtccaaccgcacatttttgagcagccagaactgatagagagagagacccagtgacttgttcaaagtcacacagctaacatatacatcaaaatctgattatttctccagtgtttttttttctttgccccctcaaacatttaatcctttcaacacagcctctcagatacttgatgaacttctatacctatgccaaagagatagcattagtacaaacacaacaacagcggcagaaaaaaatgtacggaccagacaccaactaagtaaacacaagccgcccagtcacaacattaattatacaacagcaacagtcctcaccacttgtgagctgtttaccactgcagtataaaaaggtttatgtagcttatctgagtgttttgtggcatgcgtcacaagacaaacatttggaagatgaaagctccatacacagatttctttggtgctggcacagccctaatgaccactaggtggcagtaatgtcctaacaacaatactgctgctgrcctagaacccttagaaagtgtaacaatgaattaatatcacacaactgactacacatctgaatacacagccttagtacaaagctccaaataattcattcgtttgataagttgtgctaccattgtaacagctaagaatgttttagtttatgtcacaagtaggctcaaatcaacagcctttgggcagaatctggtcagcaatgtgtttgtctagggtagtatttggttttgttgttttgttttaatctgtaatgctttttggcaagccctctctaatttgccagaactcccatcattcttcaatatcttattccatgccccacacatgtgtatggccctggaaggcatttgagattgggatccctgctagaatatctttgtctgaaatacacagtgactgtgcattgcagtctagctggtctggtcaactctcttgggcttttccacctccatttatttatttatttattttggagacagagtctcactctgtcacccaggctggagtgcagtggcatgatctcggctcactgcaacctctgcccccaggtttctagagattctcctccctcagcctcctgtgtagctgcgactacaggtgcatgygcatgcttttttttttttttttcagatggaatctcctgtcccccaggctggagagcagtagcgcaacctcggctcactgcaaccttcgcctcctgggttcaagcaattctcctgcctcagcctcctgagtagctgggattataggagcccgccaccacccccagctaatttttgtacttttagtagagacagggtttcgccatcttggccaggctggtctcaaactcctgacctcagatcatccacctacctcggcctcccaaagtgctgggattacaggcatgagccaccatgctcggccctccatttatttttccctaagtcattttggaactgtcctcacagagtcgacaagaattgcatgctgggttctgaacagaaatatagatgtaatgaaatattaatcaagctgtaatttgatccrctttcttgttgctgaaaataacgtagcactagatattgatcattggcatccccatcgttcctatagataggatttctttttttattattattattaatttattaatttatttttttgagacagggtcttactctgtcacccaggctggaatgcagtgacacaatcgcagcttgctgcagccttgacctcctgggctcaagtgatccctcccaccttagcctccagggtaactgggactacaggtgcatgccaccatgctcatctaattttttttttttaattgtagaattaaggtcttgccacgwtgcccaggctggtctcaaacttctgggttcaggcgatcctcctgcctcagtctctcagcccagcctagatagtatttctggcattaggatcataagactttaagaattgatttgcatctccactgctcctgtagacaggatctctgacattagaatcataaggcttttgtttaggaaccgtttaagatgtttttcagatcccaaattccagcaaaatagctgatgctaaccagtttgaagacccccactgaggaggaatggaattggcatgaaaatacagcttcttcatctccttgccctgacttcaccctccactctttgatcaatcaatgatctccaaatttcagcctactcccaaacctctataacccctagccacaaattcctttaggaggtggatttgaggttccttccaatgtcctcatttggtggtcctgttattaaacctcattctctgctgcaaccccatgtctccatctattgacttgctgcacatgaggggcaacaggtggcaaggcaacagacctccgatggctgcaatttctctatctatctacaatgttcttccccatggttttccttttttctttttctttttcttgttttttttttttttttttttttggcaatctttctcattcctgaaggctcaggtcaaatgtcacctcctccttccatcaggaagcttataccaggcctctctcctctaacatcccatggcacacagagcctctactactttgttggtgcttgttttctgctctgtattgttagttgtcttttgtctgtctcagctctttgtaagttcctgaggagagcagagaagtcggctacttctttgtgtgggcaatggtttccagtacagtgtcctactcatgcttgtatttcttctgactcaacaactctgccagcatctcctccacatggactaaagggaggcaggatgatttagaaaaagctttttataacataggactaaaggaatacaagtctatgaaaaattaaaactaagctaacaattccactgtctcctaaaagtactaagaggatatatcatagggtacaggataagctctagagtcagacagcctgagtacatagctttgctccacccttaacaagttgtctcaccctgagtaagccaacttacttgagaaaatattaatagcacctagttaaaagggatttttatttgtttgttttttactgtggtaagagtacttaccatgagatctgccctcttgacaaattcataagtgcacaatacattaatgttgcacagcagatctctaaaacttattcatcttgcataacggaaactgtacactcattagaacatgaaggtttttttaagaaattctactttgaaataactttagacttacagtaaagttgcaaaaattgtagtttctatatacacttcacccagtttattgaaatattagtatcttacataaatgtaatgcaattatcaaaaccaggaaatagacattgatacaacaatattaaccaaatctacagaccttgtttgaatttcaccagttttcccacagatttcttttttttgatccaatccaggatctcatattgcatttagctattatatcttcttcatcttcttcaatcagtgatagttttggaaaatccaggacagttattttcaaaatgtcccccaggttttctcatgaatagattgaagttatgcatttttggcaagaatagcacaaataggatattgtgcccttctcagtgcatcatatctggaggtacatgatcttggtatgtcctattattgatgaggttattcttgaccacttggttaaagtgatgtatgttgggtttctccactgttaagcttactattttttccctttgtaattagtaaatatcttttagggagatactttgagactatacaaatattctatttctcatactttcaccaactaattatagtatccatccatggggcttgcctacagcaattactactatggcatttgccaaatattaatcttctatttttctgattccttctacatgtatcagctgaaattctactgtaaggaagagctatttcttcttccctatttgtttatttggargcattttatgaggattaaatgaagtaggacatttacatggtgtctggcacacggtgaaggctcagtaggtgtgagtcatctttaatattattattactgagacagtatggaagttatgtaactaattgttatgtgactaatattttctagttagaaatgagtatttctaacatgtttaaaggtgttccaaaatggtctactatattagtttgctagggctgccayaacaaaagatgacagattgagtggtttaaacaacagaaatttatttcttgcagctctggaagctggaagtccaagatcaaggygtcagcgggtttggtttctcctctctccttggcttggagacggccacctccttgctgtgtcttcacgtggcctttcctctgttatgttggcacctctgctgtctatctgtgtgttctcatttcctcttctgctaaggactggtcagattgaattagggccacgctaagrgccttattttagcttgttcaagtctttaaaggccctgtgtcccaatacagtcacattctgaagtactggggcttagagtttcaacacatgaatttgggaagggggagacgtcattccacccatatctacctatttgctttgaaaaactattgtgagcaaatcattyaacatgtgaaagcactttcaraactggaaagcaccgtacaaacataaggcaatagtataacaatacgacaaatyttggtaagcattcatgcactttacatttcaggtactgaagcattcctttacaatgttattgccattattcatttaactttcctttcacggctgccacggaactctggaaggcccacttcaacccgggcactgtctgtgttatcgcacatcctcagcgagtgtcaaccacatcagtgtgttttgcttgctttttgtctttctgaagcgtgggctttcagcagctcatttcaggctatcccagctacctcttcagaggcccgaggcacctccttcctcacagggaaagctgcctgmgaggcggccggcaaccgcctctttccccgtctaccagctgcgtagccttgggcaaggcccctccgtgcagcacttcgtcccaattccacggctgaaaaagaaggataacaatcctcacaaggaggctgaggattaatgagttaatctttatagagcatttggagagcacacaatggacaaacccctatttatctctttgtagaactagcctacaaactaaactcccactaggaaactaggacccttttatataatgtttacttgaaggaagcaatctgcagattctaataaatcttagcttcccagaagtgggaaaaagcacacatttcactatatctgagtaagtaaaaaagtagaacaatttctccccaccgaaggttttgcttatcagaggctaacagaggccagggagaaactgtgacctgtggtctgccttgcctgtcatggataaggaagaaccagagactctccccagggctgtcaaatgtttttagagctgacatccttgcggtccacagcctccaaactcagagcgtgtgggaggaggggatggatacaatttaattgcctcctgcaacttgccaagcccaccaccattttcccaggctagcagtagccattccttgcttaatagtagtgctttcaagcccttcagagacaggagtacttcagcagccaaagtgggaagtccttcttccaagtcttccaaggcctttggccactgccaaagcaccccagaaaagtctgtctgtaggaactgtctctgtttaccatgttgcattacctctttgctcagaatcaatcactccacctgtgattgattgccaggggccaccaatactgctttagggggaagcttttctccacaccacatcccttattttccttgcctcactcccaggcaattttcaccacaggtctggcaacagccttctaaatgatctccataattctgctccctaatccctactgcatggtcttccctgctcctctccacctatccaacttctaaatctgaaaaaataaaatcttacaaatcccacctctattctcatatcccttggaagttcttgtttaaaggatcagtagagattagccaggccaagagaatgcctgtgtgtgagacggggcgaggagggagagaagagggccagagagcaacagggactgcagaacagcacatacaaagtcgtgatgtgagaacgtggctcacgtatgcaactactcgggactcagcaaaactggaacctagaaggaaataaagctggcgaggatcagcaaagccaggccccctgtgaaggagtttggactttatctaggagaaagtgggggccattgaagggttttaagtacacaagtgtcacaaacaagtttgcatttaagaaagatttctctggcaacagagcggagaatacattagaggagaaatactggaagcagagagaccatctgagaggctggtacaattatccacagttgatgacagcaaggggtaagaaggagaggggatgttaacctcagcagcgttactcaaaagtgttgtccttgggcaaatgccaacttctggaccaatgtctgtcctccaactgtttttcctgatctgttatgagataaagaacttgtgccagaatgtaaagtcaaggcaggcacttattgcttcatcataaaaagtcttgctttaggggggaaaataagtcagtcatactacacagtgtgcttagtgaagtatttgatttacattctggcccaagtcccttatctttgtgaaacggtaacagtctgcagaccagcactgtaagtggcactgactccaaggactttctggattgatgatgatttggatccaaatgagaagtttataatcatggtgggttcggtaaatgagggagacaatacatgcttataagaaaagcaagtaacccaactgtggacagggtgataacctgaatgagtgatgcattatctcactcattctttgaggactccaactgagaagctggatccctgaatggaatgaccgtaggtttttgcataagtcagaactgagttcaaatcctaacttcatgacttactgggtaaacttatgttagttagctgacttctctgaaccttatttccctgcgtataaaatgggagaaataatacctgcctcacagcgatgtgagctcatgacctagcacatgggaggtgtttgttcactgttccccagatgtggcacatggtgtgaattctttgaaaaaaaatgtgctgaatatcatttttaaaataaacagaaaagtaatgagaagacagtttttaaaaagtgatacaaacacagagttgggagtgtgtaatcagctcttctggaatatcaaactgtaaaaagatagtaaaaccgtgcagctaaggtctgtctgcagccgagttgtaaaatctacttttcttaccccatcttcctctcacagacacttmttcctacctccatcctcagcctcacattctggggcccagctttgagtcatcttgactaaggatccatcctcagccttgggtcttggtctggtaacagggctctgccttggtgcctgttttggtcctgttcatgctgttayaggtattgtcccaatactccaggtccctctgctagaacacctgggctgctcttgccaatcccctcccaaagagattcctaagctgtcaggcctatggctattgccctggtgcctacttgcagacaactgtgctttgagaacataccagaagcccactgccagcttgtatggatctctttacaatttgcctgctggattctgatgcaatatgctgtcccctcaggccccaaactttgcagtcagatggaaactttcccagagcctgaggagtccaggggtcccccatccctcagtgcctgccttagccctagtgtcaaattcagttctatagccaagctttttgctacatgtacctgagacaagaaaacaagacaagcggaatgtattttatgtctatatagcagtttataatttacaaaattctttcacattatctcatttgaccctcacaccaaactcacgatacaaaaaataagaaatttccgtattttatagataagtgcaagtgactaactggggcgatcaactgtcccagtttgtccaggattgagggagttcccagactgcaggactttcagtgctaaaaccaggacagtcctgggcaaactgggatggtcagtcaccctaggtcacatagctagtaaatgactgagctaggatttgaacytaaggcacctagcctgtacttattacacttattgagttattgaactcaatagttattattgctaatattatttaacagttattgagttattgagctcaataactgttaaatgaatgacagacacctagtctgtctcctttccactgtgccatgtgcttctcctaaacagcagtctcttcagactaatacataaaggtgttgcttgccttctttcttcttgaaatgccaatcagtggaaaggagaagggaaacactgctttgcaagagaaaagcatccttgcattaactccatgtcagaataatcactgacagtaataatttcaacaaagggattaattacagagtctgtaattatcttagcaagagcttgaaatcaaaaatgattgtgatgggccactaacccaatcaatatatgcactctgccctgggataatctaagactgactgcatatatgaatattcagtacatgtaaattttaaatcctaccatcagataaaaacaaagagttgtaagagatttagtggtcagtatacgtccttccattcaaccttgacttcactgaaaccatctcagaaaagataacaattggtgctccttttaaagatgtccctctgaggcaagcccaagagcttcttcaggtgccactttcagccaccactgaatgatgagtacagcttaacctaagcttaacctttacttagcttaagctagtaaaaggagttctggatatcagagcttgtttactttccctctaccagactctctgtgcaggacacaacctccagtttcctatcccctcaaacccctgccaactcaagctctcctctgtcacccaggatgccactatcccccaagactatgtctagcctttcttttgacatatttccttagttaacttatataatcttctgggataatttttttaagagatagagtcttctctgttgcacaggctagagtgcagtagcacaatcatagttcattgcagcctcaaactcttgggctcaagtaatccttcctctttcagccccccgagtatctgggattacaggtgcatgccaccaagcccagctaattgttttatagtttgtaaagacaaggtctagctgttgcccaagctggtctggaagtcctggcctcaagcaatcctcccaccacagcttcctaaagcactgggattacaggtgtgagccaacacacccacatctttcgggatagttaattccagagatttgtatgcacccaacatttaacttttttttctttctggatatccatcattcattcagcaaacatttaggaaatgactataatgtgtcaggcactgtgctaggtactgaggytagtcgcagaaaagttacaggagttcctaaggcagttaagggaatacagaatagaaaagtcattcctggaaaagaggacagcatcacatatacaagacaatatgctcagacaactacaaaataagttcaaaaaagcaggaggcaggaagtctttaggagttggcacccatggccaactggataattcggtacttttccaggaagtcttctctggctaatctcgagagaaccaatagcttctgcccctcaycttgaataaacataaggcattcaagacctcctgaggccatcctctcttattttccagtttccaattgttttccactgtgaaaatatcttagctcctatttgcattttcttttccatcactctctgtatataccctatatactaatcgacatcaatgttttctgccagcaaccactgggaagggtggagtagccktcgcttcctgagacccaggaagaagagaaaaccatgaggttatcatctctgtgctatgattaagctactgtgtgtttccttcaaagtctggttaacctaacttaacacaacctcaaatacctgtctctgtgaagcatgctctatcaactgaaggaacagaatcccttacactcccaaagatgctttccaatggcagaaagggagctaagcagaggactggcttaattcaggctgtattaaaagcaataccaagaaagggaagggaactgaaagaaggctaggaaaaacaagggaggaggaaaaagtggctctctagaaaatgttcctggttttcaacactattacgggcatgacaatcatgtgcctgctccacacacaggcttagctagaagttattccccaaatcctacctgccaagcctaagctgattggaaaagtgataggatctgatccaagctctgtcaccccacgggctggacaatggcctgtgaagcagcctcagcatgatgatactgatggctgtaataatagcagctatgatgcattaggggttacgatgtgcatggtagataatttatctcatttaatcctcgcaacaactctatggggtacatactattattatctccctttcacagatgacaatacatgtttcaagaggtttcacaagtctgccaatcttagaggattgagtcaaactctggtctgtctgatttcagaaccaaacccttcctcacctttcagtattgcctttcattcatgtatttatttattttaaaaaaatttcttctgtacccgctattaaccaagcactgtggcaagtgctggggatacaatggaggccaagacttaaaaagaccctgccccctggggcttatactgcacagaggagatagatacacagtaagcaaataacacaaataagtacaggctgcattcagtagtatgaagaagacgaagagtttgttatgataggtataggggaggccgggtgtggtggctcatgcctgtaatcccaacactttgggaggctgaggtgggcaggtcacttgagttcaagagtttgagaccagcctaagcaacatagcgaaaccctgtctctacaaaaaataaaaaaatagctgggcgtggcgttgcatgcctgtcatccctgctactcaggcggctaaggctcaaggatcacttaagcccaggaggtggaggttgcagtgagccgagatcgtgccactgcactccagcctgggtgacagagcaagactccgtctcaaaagaaaaagaaaaaaagagaaagaaaggagaggtgtaaggagacttacttagataggtggttagggaagccccctcaaggaagggacattacactgagatctgaaggatgtgacagagccagttataaggtgacctgagaaaaaggcaagggaacaagatgcagaacaggcaaatcaaagaagagacagaggtcagtgaggctgggtgtctagagagcttggcagaggctggatgtcacggggccttaaagtccaccagaggagttagaactggcttccaagtgcaatggcaagctacgggatagagtaaagcagtggagagtggagatggctggtttactttttattaaaaagagaaggggcataatgcagtagttaagaagatagactctggaccgataatgcctgcaytcaaatccctgacttgctgcttaccaactctgtaactgtgacaacctcttctgtgcctcagtttccttatcttggaaatacagacactaaccaaacctgcctcagagggctgttggaatgattaaattaattgctatttgaaaccacgtagaatactgcttggtatctagtaataaacatgcttacaaaatacattaataaacataattaatagatgtctttacaaacataacaacataaatttgttttgcagacgtacagaaatgtaatatcaaaagcatgcttttctttcagtgaagcctttctgcattgttctttctctttcttcctctttctcccgctccactacatcagcaactgctcctccttaaggtaatttatgtcaggaacgccatatgtttccgaccacagaattctaaataggcagacataagatttatgtgcatacacatatgtggcattcttttatctttgttttgcaaaagttaaattattatgtacaattgacccttgaacaactcaggatctagggacgccgaccctctgcacagtcaaaaatccatgtatatcaccaccactagaaaaaagaaaaagatattttgtatgttatatggattatatatgtattcttacaataaagaaataaagaaaagaaaatgttattaagaaagtcataatgaagataaatatatttactattctattcattaagtagaagtcaaccatcataaaggtcttcatccctcattgtcttcataagtaggctgaggaggagaggaagatgaggggttggccttgctgtctcagaggtagcagaggtggagaaggtggaggaggtggaaggggaggcaggagaggaaggcacttccttggtgtaacttctattgaaaaaaataaaacatgtaagtggacccacacagttcaaacctgtgttgctctagtgtcaactgtatatctttttctcactcaaaccagtataactccatttcatcatttaaatgagtgtattccggtccatggaggcagatgtaccataatttattcagctgtcctcaaccgatggacattcattggtccccacttcttttgctgttactaacactgtctcagtaaacattattgtttaaatgaccttgcagtctagtggtttcacctctatgaagtagatttctaggagtgagtagatttttaggagattgctagactagatgacataattattattttttaaatagatatagatgaaagatcgcttgtttaaaagactaatactgttttcatttcctgcaggaagatatgtgaatgctcatttgcctacatccttgccacagcaggtcatttttggatgggtgcaaacttatgttactttttttataaaaatgtttgtattcagtgaaaatgtacatgtagtaaaaatacacagattataagtatacagtttgaggagttttcacacgtgtttataccacgttataccatgtcaccaataccacgatcaagatatagatatttccagcaccccagataatctcccttgcagccaaaccccaccctctgtaggcaaccactgttttgatttctatcaacgtagatcagttttgtgtgtaattaaacctcctataaataaagtcatgtaatgttctttttggtgtctggcttcttttgctcaacgtaatatttttgagatacatccatgttgttgcacatatcaataagtaaacagtagataatcagggctgggcatggtggcttgcacctataatcccagctactcgagaggatcacttgagcccaggagttcgaggtcaaaatttaaatagaacaaaatgtactattccatatgttccattgagttttgacaattgtatacacccatttaaccaccatgccaaacatttccataatctcaggttctcttggcccttcatggttaatttccatgccaccttactccatccacagtctgttctagagctttatgcaaatggaatcatagagtatgtactctctatatctggtttctgtcactaaacataatactttttaaaattcatttgtgttgtttcagttaatggtagttcattcctttttattactgattagtatttcatatagcacaatttgtttctccattttcctgttgctggacattggtgttgattctcattttttagattttctgtataagactgccataaactttcttgtgcaagtctttttgttgacatgtatttttatttcttttgtataaatacctgggattataattgttagattacagccrgatgtataaatttgtaagaaaatgacaagcagatttccaaatgtaacattttgcactcctaccacaaatgtatgagttttagttgctccacatcttcctcaacatctggtgagttataggatctttttatatattctagaaataagtcctcatattcatatatatattcatattaatatacatgtacatatagagaaagagaaagagagagaattatgagtattttctcctggtcagggcttgctcttccattttcttattcaygtcttttaacgaagagaggtttttccttttatgcagtgcttttttcctaaatatttgtctgccccaagttcacaaagatatgcttatttctatgcttgctatgtttacttatagaagtgttctacttttagttctacatttaggattttattcatcctgaattaatgtttgtgtatggtataaggtaggaatcaaaggtaattttctccacatttatagagtttttacaaaatgatttggtgaaaacttttctttcccagttaaaactgctgcagtgtcttttattaaaattgaattgaacatatatgtatgcaaatattgctggattctctagtgtattgatcctgtttgcctatccttatgccagcacaatgccacatttattactgtagctgtgtagtcggtcttaaaatcagatagtgtatttgttttttttattctaatgaagatttgttttggttatccaatatgcattatgcatttccatgtaaattttaaagtaaacatgtcaatttctacaaataaaatctgttttcattttgactggaatgacattgaatctattaatcaatctaggtagacttgacatcttgacaatatttagtattctgacccagttatttaagtcacctttaatagctctcagaaatatgtagttttactgcagaggtttggcatatcttttgttaaatttattctctagtattttatgctttttggtactattgaaaatctttcatttagcagggtagaaaattaaaaaagaaagaaaaatgaatttgagttgttctcttctgtatgctttccaattgtttgccgcaagtatatagaaataaagacaacattcaaattgtccctgtttgcagatgacatgattgtatatctagaaaaccccatcgtctcagcccaaaatctccttaagctgacaagcaacttcagcaaagtctcaggatacaaaatcaatgtgcaaaaatcacaagcattcttatacatcaataacagacaaacagagagccaaatcatgagtgaactctcattcacaattgcttcaaagagaataaaatacctaggaatccaacttacaagggacgtgaaggacctcttgaaggagaactacaaaccactgctcaatgaaataaaagaggacacaaacaaatggaagaatattccatgcttatgggtaggaagaatcaatttcgtgaaaatggccatactgcccaaggtaatttatagattcaatgccatccccaccaagctaccaatgactttcttcacagaattggaaaaaaccactttaaagttcatatggaaccaaaaaagagcccgcatcgccaagtcaatcctaagccaaaagaacaaagctggaggcatcacgctacctgatatactacaaggctacagtaaccaaaacagcatggtactggtgccaaaacagagatatagaccaacagaacagaacagagccctcagaaataataccacacatctacaaccatctgatctttgacaaacctgacaaaaacaagaaatggggaaagggttccctatttaataaatggtgctgggaaaactggctagctatatgtagaaagctgaaactggatcctttccttacaccttatataaaaattaattcaagatggattaaagacttaaatgttagacctaaaaccataaaccccctagaagaaaacctaggcaataccattcaggacataggcatgagcaaggacttcatgtctaaaacaccaaaagcaatggcaacaaaagccaaaattgacaaatgggatctaattaaactaaagagcttctgcacagcaaaagaaactactatcagagtgaacaggcaacctacagaatgggasaaaatttttgcaatctattcatctgacaaagggctaatatctagaatctacaaagaactcaaacaaatttacaagaaaaaaacaaacaaccccatcaacaagtgggtgaaagatatgaacagacacttctcaaaagaagacatttatgcagccaacagacacatgaaaaaatgctcatcatcactcgccatcagagaaatgcaaatcaaaaccacaatgagataccatctcacaccagttagaatggcgatcattaaaaagtcaggaaacaacaggtgctggagaggatgtggagaaataggaacactttacactgttggtgggactgtaaactagttcaaccattgtggaagacagtgtggcgattcctcagygatctagaactagaaataccatttgacccagccatcccattactgggtatatacccaaaggattataaatcatgctgctgtaaagacacatgcacacatatgtttattgcagcactattcacaatagcaaaggcttggaaccaacctaaatgttcagcaatgatagactggattaagaaaacgtggcacatatacaccatggaatactatgcagccataaaaaatgatgagttcatgtcctttgtagggacatggatgaagctggaaaccatcattctcagcaaactatcgcaaggacaaaaaaccaaacaccacatgttctcactcacaggtgggaattgaacaatgagaacacttggacacatgaagggaaacatcacacactggggccttttgtggggtaggggggaggggggagggataacattaggagatatacctaatgtaaatgacgaattaatgggtgcaggacaccaacatggcacatgtatacacatgtaacaaacctgcacgttgtgcacatgtaccctagaacttaaagtataataaaaatatatatatatatataaaatttcaaaaaaagaaatagggttaatttgtgtattttgaccttgtatcctacaatctaactattcacatagactttgtaggtttttataaacaagtttttttaaggtaacaaatcatgttgtctccaagtaaatacagtttcatttctccctttgcaatcacatgtattttatttctttttcttgccatatgttattggctagtgtctccagtgcagtgtaaaataataagtaataaacacaaactttcttgcattgtttcaagacttacagtgaaagaatttaatatttctttattatcattatttcttaagacaggatcttgctctgttgcccaggctggagtgtagtggcacagtcatatctcattgtaacatcaaactcctaggctcaagtgatcctcctgcctcagcctcctgagtagcttggactacaggcatatgtcaccacacttagctaatttttgcatttttttgtagagataggagtctccgcatgttgcccaggctggtcttgaatccctggccttaagggatcctcctgtgttggcctcccaaagtgttgagtttacaagtattagccactgtgcccagtttacattcaatatttcatcaataagtataatgttagctttgcagacaccaccaccaccgggagcccagtactacccaccatggtcaattccactgtgttctttgacatcgccatcaacagccagtccttgggcctcatctttttcaagctgtttgcagacaaatttccaaaaacaacgaaaactttcatgctctgagcactgtagagaaaggatttggttataagrgttcctgctttcacagaattatttcagagtttatgtgtcagggtggtgacttcccatgccataatggcactgatggcaagttcatctacggggagaaatttgatgatgagaacttcattctgaagcatacaggtcctggcatcttgtccatagcaaatgctagacccaactcaaacggttctcagtttttcatctgcactgccaagactgagtggttggatggcaagcatgtggtctttggcaaggtgaaagaaggcatgaatattgtggaggccatggaccgctctgggtccaggaatggcaagaccaacaagaagattatcattgctgactgtgggcaactctaataagcttgacttgtgttttaacttaaccaccagaccaatccttctgtagctcaggagagcacccctccaccccatatgcttcagtatcctataatctttgtactctcattgcagttccctttgtgttctctcttttccttattccctttctatgcctagctggattgcagagttaagtttataactatgaaataaaaactacataacaataaagagcataacattatctgtaagtttctcatagatgccctttatgaaattaaagcattttctttctattctattcttcctttagtgaaggtttctaatcatgaattgatgttttattttgtcaaatgctttttctgcatatattgaatataactatcatagttttctctttttctctttgatgtgtgagtttcattgattggtttgaagaagaccttgaactaagcttgcattcctaagataagctctacttggtaataatatattatccgttttaggcattgctcaatttgatgtactaatgttttgtacagaatttttgcatctgtgttcatgaggaatactcatctgtaattttttatttctttgttttattatctgtttttaaaatttatttgacaggctttgatgtcaatataattctggccttgtgaaggaaatttggggcagttcccttctcatatattttttaagaagtttgcaggctgggcatggtggctcatgcctgtaatcccagtctgagggagtctgaggcaggaggatcacttgagtccgggagcttgagaccagcctggtcaacacaggcagactgtccctacaaaaaaatttgaaaattagccagacatggtggcatgcacctgtagtcccagctactcaagaggctgaggtggaaggattccttgagcccaggagtttgagggtgcagcaagctatgattgtgccactgcactccagcctgggcaacaaagcaataacctgtctcaaaagaaagaaaaaagtttgtgttagatttgtattatttcagctgggcatggtggctcacacctataataccagcactttgggaggctgaggtgggaggatcacttgagatcatgagtttgagaccagcctgaggaacatagtgagaccctgtctatacaaaatattttttaaggctgggtgtggtggcttacacctgtaatcccagcactttgggaggccaaggcaggtgatcacttgaggccaggagttcaagaccagcctggccaacatggcaaaaccccatatctacaaatacaaaaatacacacaaaaaaattagtgaggcatggtggtgcacatgtgtaatctcaactacttgggaggctgaggcatgagaattgcttgaacccggtaggcggggttgaagtgagccgagatctcaccactgcatcccaacctgggcaacagagcaagactctgtctccaaaataataataataataatttttaaaaagttagcatggtgtggtagcacacgtctatagtaccaggtacttaggaggctgagacgggggatcccttaagctcaggagtttgaggctgcagtgagctatgatcagtgccactgcactccagcctgggcaacagagtgagaagtcatctccactaaaaaaaaaaaaaaaaaaaaaaaaaatttatactatttctaccttaaatatttgatagaattcatcattgaaactatctgggtctatgagatcagctacttctggatgatgcggtatgagagaaaaaaacatattcatgggctcactcctgtgcctccttctttgaagtgggttccctgctcaaatgctgtgtttgtgagagtccaggcctagatgtcagtaattctgtaagccccctagagagtggtactagctgagattttgcattcctggaaccagtatttatctctgtgagaaagaaattctgaccgttccagaatttaatagttgatttggtggcaaatcaactacttggatagaaggggcccaaagtagctgacttgccaccaagttacgggttgtcttcctggaggatcagtgccatatattgccatattagtggtaggcacattggtctacgccactgaaagtttgaatattcaaaagaggcaatagctatatcgaacctggtaaaaagtccatgctgttgacctatacgtagcttccatatctgccactatagcatttcttgtgctggttgcagggtggccaatgacaaagactagctaacatcaactgtccaaataatgttaaataattggttgctcagtgcctctttgctggtggatgtgtgcaagtgagggttaacgtgtgatacaaaaatctttacactttatgcccactttcatatttcctctgcctccatatatctacctgagacttccttgtcttcagtcttctagtccttttccttccagcccccttaacagacagttaggccattttccactatctaggatttttcatatatttttgtttcaggcgacttctttcacaaaaagtggatgactcagtatacttacaacaggtctgcccattggaaatttcactctccactttcaaggccaactcggattgtacctataatacagtcactgtttatagtcagcttgcacacacatactgagaccaatcattgacaaaccaagatcatgctttttcctcctctatcagctggtcgtatgagaccccttatgtggccataggtgtaagctgggaaataaacacttgtgcaactacggagagtgatgtactgtatactcatgccctctggtcatacttgggcttaacctcggaaaaactattatgatgaacagcagctgggcctgctctaatttgtgatttggtaagtcccacctctgacatttccagcaaatttggggtcagtcatgggcccgaatgacagaactgcttgcaccacagccttgctttagtggacagctttttcctgctctgggcctcactcaaagctagtggtacttctaggtgtatagtgtgttatcttatacacccacaaatgaaagatgcctgtcacacactgagcttccttctttgtgataagggatgcaagatgtgcctcttaatttgaaggggatagtccaatgttccccagactactagatccatacaaactacatcaaagtgagaggtcaataaatcttcatagtgtttatcttgcaagtgtcttatgaagtcttctagagtattatccagtcggcataatgtcattgatggaatgaatcaatatgacttgtagcgaaatttcaagaagatccaaatatcttcagattatattgtggtaaaaggaagagggtcagcatagccctggatcaaagctgcagttgaatattactcacatcacatgaatgcaaattatctctaatcttctttctaattggaatagaaaagaatccatttcccaaatcaatgaccacacaccacgtacctgaaatctcattaacctattttatctcatttatctagcaataaaaccacatccagcacagtagctacaactggggctatcacttgtttgagctgtggttttctgctgttattctccagaatcacccagtttctgcaggatccagactggtgctgctaaatgaggatatgagagtgagtagtgaccaccatccctgcatttttagatctttaatagtagcattaatctctgctattcctctactccagggtgcaatttttctccatttgctgccttggctgggggaaggggtgtatggacggtttcaagaggtttccacttggccttctccactatgatatggccttccccacaggtcaatgatacaaagtggggttcctctgactgccagtatgtcaatcctagttatgcacttagagatttgagaaaggatcactgggggtgtctatggacccaccgtagctagaatttacacaggcatttatttgttacctggcctcatcaaactccaatctcacgggggcagaaggaggaccatgatgacactgtgtctctggagatgaatcaaattagacaatgtgtcctttttttggggcagggacttctgaattaagatgatccttcagtgctatcccaagttgaggtgagagagtggtgcctttgtacccctactggatcagtcattaggtgttagctgccctgaagaggccttatctctgaatatgtttgcccaagattcccagcaccatagctattaattccttgttcctgaagggacatttgggcaatggatcacagtatctactacaggaatgtccttagaaacaatgtctgtaagagagtaaaaaagcatgattgggcggagggagaagttgaagtgtgatgcagttgtaacagagtcctcagcaaatccagggagctctggaactggcatgacccttcagagttgtcctgaactcttgtactctttgtaccagagtttgtactcttgcttcaaccagcattgaatgcaggctgcccatcaaaaagggatataaagcyggttgccgtggctcatgcctgtaatcccagaacatcaggaggctgaagagagcagagatcatttaaggccaggagttcgagaccagcctggccaacatggtgaaaccccatctctactaaaaatacaaaaataatctgggcatggtgacacatgcctgtagtcccagctactcaaaaggctgaggcaccagaatcagtcgaaccctggaggcagagtttgcacagagctgagatggcaccgctgcactccagcctgggtgaccctgtctaaaaaagagtgagaccctgtttaaaaaaaaaaaaaaaaggaaagaaagagagaagtagaaaaagaaaaagggatatataatcttaaaccgaggacaatgctcaaggagggaatccttgtgagctgccaacagtcaatactctcaacagttgggaaaatgaatgccttagtcttagagggagtctctgggtggtgtaccacaatctccataacaggaatcagcagcatatagacactaactcatgccatgaatacggatgagatcactagggagaaaatatggagagtaaagagaagagcatccagaacctagccctaaatcaaaccaaaccagtagaagtcagttagaggacagctggcaaaaagagatggagaaagagcaatcagcatgctaggagaaaatccaggagaacaaagtgtaactgaagtcagaaaagatagaattatctaccaagtggaataatactgaagggctaacaaataaaagacaaaaaacatgtccattgttttgtcaatatgaagtccactggtaattttgagcaaaaattattttagcaaatgcaatacacagaagccagattacagtgtgttgaaggatgaaatggagttcaggcagtgaagacagcatacatatttatacaacttttttagttttactgtacaagggaacataaaaatggggggaggtggtagctgaagggaaataagggtttacagaggattctaggtctttttgtttatttatgcttgcttcttaatttggtatctattagagtgtgtttgtagttggggaaagagacgaatgatggtggagaaaaaataagagaagaaatagggacaatatttggttgatagaacaactcagtcccaggacagaattggagaggatagcctttggtaagcacaaaactatgacaaaagaagatggggagagatgcaggcaagattgttgatttgatggtggagaatgaagaaattcccaactgatgccttttattttctcaaagaaatatagtagtcttgggtaggctctgttttatgcattgcagatctgtctccatcctaaactatgatggctcaaggctctggttctcatcattacacaggaagagagaaacaaggtgtggctctgaagagctgacagccacttggcacatgtcacttcagttttttgccttctttctttttacttccatttacagtcatgtgtgccagctttcagactggtaaacaaagggtggggctgaaggtcaaaaggt

SEQ ID NO: 93486 - DNA, 35218 bp, Homo sapiens
tttatttttagtagagacgggatttcaccatgatggccaggctggtctcaaactcctgacttcaaatgatccacccgcctgatctcagctcactgcaacctctgcctcccaggttcaagcgattttcctgcctcagcccgcctagtagctgagattacaggcgtgggccagcatgccccgctaatttttgcattttttagtagagatggggtgtcaccatgttggactgtctggtctcaaactcctaacctcaagtgatccgcccaccttggcctcccaaaatgctgggattacaggtgtgagccactgcgccgggcttttttttttttttttttttttgagacagggtctcgctctgttgcccaggctggagtgcagtggcaatgatgtcagctcactgcagcctctgcctccaggctcaggtgttcctgctaccttagcctcctgagtagctgggactacaggcacgtgccaccatgcctggctaattttttttttttttttgagatagagtttcactcttgttgcccaggctggagtgcaatggctcgatctcagctcactgcaacctccacctcccgggttcaagcaattctcctgcctcagcctcctgagttgctgggattacaagcgcctgccaccacacccggccaatttttgtatttttagtagagatggggtttcaccatattggccaggctggtctcgaattcctgacctcaggtcatccgcctgcctcggcctcccaaagtgctgggattacaggcatgagccaccatgcccggcccacgcccagctaatttttgtattctttgtagagacggaggtctcactttgttgcccagattggtctcaaattgctgggctcaagtgatgcaccagcctcggcctcccaaaatgctggaattacaggtgtgagccactgcgcccagtcctggcctaatagttttttaatagttgcaaaatcgtccataaaatgaaagttccccaatgtattgaatggtaaattgaataaattaccataactggcattgatggatattcaggttactacttttcaaaaacctattgtattacaaataatgttgcagttgtatcctggtacatgtaccttttttttttttttttttttttttggaggttggggggcagagtctcactctgtgcccagactggaatgcagtaccacaatcactgctcacctcagcctctacctcccaggctcaggtgatcctcctgcctcagcctcctgagtagctgggactacaggtgcacaccaccatgccaggctaatttttttgtattttttcgtagaaacggggtttcgccattttgctcaggctggtctcgaaccctgggctcaaatcgtccgcctgccctagcctcccaaagtgctgggattacaggtgtgagccactgagcccagcctctttctccaagtttaactttattttgtatccaacctattttcttctcatctatattgttcttcatgttcatgtactagttatttttgtttgtttgtttgggtgaagtattgtaattacagaaatgagactttttttttttaaatgaaaggcctcacatatttattactgaacccagccaaccaatgcgttcataacagattcggagaggaaaacacgtcgaactctccagataggggtgacattttcagcttgatatggtaacgtgatcgtgaccttcagacagcataaatatgtgtgccatctcatgtacaattccttatagacccagcttggttcttctccaatgtctccttttggagttgtacctgattttatttccagttttcatccgaatccactggggaatgggacgattttgcttttgtttcttgggcaggaatcacttaatcctgaaagtcttgtgagaagacatggtgagggtggagtcaagaacacaccacgatggcagagaaaggaaaagaggcatgagatcattttatacccatcatgcaaccacaagcttttctcaactgataatactaggacattagttatagacccattttttttttttttgagacggagtctcactctgtcgcccaggttggagtgcagtggcgtaatcttggctcactgcagcctctgcctcctgggttcaagcaattgtcctgtctcagcgttcctgagtagctgggattacaggtgtgcgctaccacgcctggctgatttttatatttttagtagtagagacagggtttcaccatgttgaccagcctggtctcaaattcctgacctcaggtgatctgcctgcttcggcctcccaaagtgctgggattacaggtgtgagccactgcgccaagctccaacattctttttttgtaattttttttttttttgagatcagcctgtcaggttggagtgcagtggtgcaatctcagctcactgcaaccttggcctcccaagttgaagtgattctcctgcctcaacctcccaagtaggtgggattacaggcatgcatcaccacgcccagctaatttttgtattcttagtagaggcagagttttgccacgttggccaggctggtcttgaactcctgacctcagatattctgcctgccttggtctcccagagtgctgggattacaggcgtgagccaccatgcctggcttccttttaatgcatgcataatgttctattgtatggtatgttggggagaaaaaaagagttttcctctacccttccgaggttttggttgtgatagacccctgtaacaaaagacagattaacaagaagaaaacaaacaggaccaggcatggtggctcatgcctgtaatcccaacactttgggagcccaggagttccagaccagcctgggcaatatggcaaaaaaccatctctacaaaaaatgtaaaaattagctgggcatggtagtggatgcctgtggtcccaggtactctactctggtggctgaggtgggtggatcgcttgagcccaggagcgagaggttgcagtgagccgtgatagtgccattgcacttcagcctgggtgacagagcgaagccatctcaaaataaataaaagaaagaaagaaaaaaagaaaaacagaaatttaaaaacatgtacgtcacgtattcaaaagagagaccagggaaatgagcaaatctccaagaggtagctttgaattcaggattatacagcatcttcaaaaaagaacagtatatgtttagagaagtgttaagagaactgggcacagtgactcacgcctgtaattccagcactttgggaggccgaggtgggcggatcacctgaggtcgggagttcgagaccagcctaaccaacacggagaaaccccatctctactaaaaatacaaaattagctgggtgtggtggcgcttccctataatcccagctactcaggaggctgaggcaggagaattgcttgaacccgagaggcggacgttgccgtgagactgcgccattgcactccagcctgggcaacaagagcgaaacttcgtctcaaaaaaaaaaaaaaaagaaagaaagaaaaaaaaagagaagtgttaagagaaggaaaatgattttgagtctctaggggtggcaaattatgggaaggcaaatacgcgatagaaaaaggctcattaatgaagtttgtcatgtagattcctggctgataaaggtttgtcaaaagacaaaattacaactaatttagtttaaagagcataattggcttttagttgcgattgtagaattgtgcaacacctcattttataaaatcgaatgagtgttcctatgagttgagtggaggaggttggctttcagaaagggctgaagaaagcagaaacagaaaagtgcattggttgtttcgaggttactttccttgaaaagtttaaagcagagggtatttccttatcatgtcacttcaaactggtctgtcgggaatttggctattatttttctttctcctgatttcttagaaagtcagatcgacaacttagttttgaccttgtgatgtggaacatgagtgacttgagtgactccattttggtttagtctgttgggcctagtctagtgcaggagctcagtccaaaccaatggcttcctatgaattttatttaacaggcgtaaaattgtctttagtgattaacctttgtccttccaggcagtgtgggaagagggatacctttgccttttaaaatttatgtcctgctttacttcagacattacactaaataggagtgttgagtataaaaatgaattcacaattaaagttgttaaattatttgtatataactttaaaaggagtttttttgaagctttgtaattacattgaaagtatatttgtttccttgaaaacaattttttgaaaagtgaataataatataatacagctttcaaattactttatgctgttactttatttctattgtattcacatgtgaaagtatgtgatcagttgttgctgtatcagagatattagagattctttattagttgggcattctttatgaccttttctataaaagagtaaggacattaaaatgtaagatgcatgataaaaatataagtagcgaggctcattgtagttagcctaaattaagtaatgtttaaggtaggtgttcatggccaggcgcggtggctcacacctgtaatcccagcactttgtgaggccgaggcgggtggatcatgaggtcaggagatcgagaccatcctggctgacacactgaaacctcgtctctactaaaaatacacaaaattagccaggcacggtggcgggtgcctgtagtcccagctacaggctgaggcagaagaattgcttgaacccgggacgtagagtttgcagtgagctgagatcgcaccactgcactccagactgggcaacagagcgagactccgtctcaaaaaaaaaaaaaaaaagtaagtgttcagagtaatacttttctacattatactgagagaaattataaattataaagtatatcaaattatattattttactaattttacttttatgtaataaaatgcaatatatttaaaaattgttaaaaaaataaaatttatgtcctgcttttaggcaaatggggaaggcggagaactttccacccacgtatctacatcgtatctacatcttctcaattgtcttcggcttgaaataatccttaggctaaagaggcgtattttggggtggcacattctggtgtccttacaggtacactacttttattcatgtctgttactactattacacccccttcaccttgggccaccccatcctcagtctccctcatttttctttacagttagcaccatttacccattcacggagaaccttacagttctcgcaacagggtgatcactcagtaagtactgttgtccctttggtctgtttctggcagcgattagctgtgcgcattctttgagaggagcgacggagggaacagaagagggtactagtgaagaactaaggtgcttcacccaaatagatagggaaggaggaggagagctgaggcgagcctcagcttctgcctttttttttttttttttttttttttgagacggagtctggctctgtctcccaggctggagtgcagtggcgcaatctcggctcactgcaagctccgcctcccgggttcacgccattctcctgcctcagcctcccgagtagctgggactacaggcgcccgccactatgccgagctaaatttttgtatttttagtagagacggggtttcaccgtgttagccaggatggtctcgatctcctgacctcatgatccacccacctcggcctcccaaagtgctgggattacaggcttgagccaccgcgcccggccagcttctgccttcgatgtcttctgaaggagggtgggcttcgaggcggcaggatgtgcttagggcactgagtggcccagagtggggagctcctgcagggttgagaggaccggcggggcgaggtcggggcggggctcgcaggacctgggcggggctcgcaggggctgggcggcctgggggcggggctgggcggagcgcgcagccgcgcagcggtgggaggactgcggggctcttgaggccagctgcagagcttgtggaggccatggggcgcgtcgtcgcggagctcgtctcctcgctgctggggttgtggctgttgctgtgcagctgcggatgccccgagggcgccgagctgcgtgctccgccagataaaatcggtaggcgagaagggggcggcgcgggaaggtgctggagcgcgccccgcgccgggcggccgctgcgcagtgcgcccagatcccacagccgcgacgcagtccagcggtgcaggccgagccagctgcgcaggtcgcgctttcccccattcacacttcagggcggctttcagctctgstcggaataggactgtgcattcccaggcgtggagaggtgcccacttgaggaatgggcgtggacggggacaggggcgggcgggcaggcaggcgcctagcgtacctgtagcccctgtctcttaggtgtggggctccggggaggcctaggtttctctatcttccsgttgaacactgaccgtgaagactccagtgttctggcttgacctggggcgcccggccagattaacaggctcacgcaggcacagcacagggaggagtgcaaacaagttgaccctgcctgcttcccttgggaggctgaaccsccttcccccagctccgctttgctgaggtcggcctgctctcagaggcccttggcttgcacagtttctccgcctaggactaacacagctgcagaaagaatctgttctctttccactgtcaagagctccagtgtcaggagccttggctctttgcttcctgtctccctcccgcccccctttaaagttgtgttcttcggtatcattaacctatctacattgaatctagacacaacaaagctaggcataaatggccgtcactttattaaaaatgcgtgctggaaaggtccacctctaatgtgcccgtgagttgggcatctggaaggktgtgcaggccccttggttcctccataaagacctgtgagaatctttgggcatctggaaaaaaaatcgagttaatgtcaatatgttaattaatctactgcttttgtctgggaacagtgtctgtccagattcagggagttagaccttcgctgcaggtgtcactcttcccccaccaaattgttggtaatagctttgagtaacaacctcygctattgatggtctttcaaaaacaaaacaactcacagagctggtaaaaggggaaaatataatcttctgtttttttccctcatagcgattattggagccggaattggtggcacttcagcagcctattacctgcggcagaaatttgggaaagatgtgaagatagacctgttkgaaagagaagaggtcgggggccgcctggctaccatgatggtgcaggggcaagaatacgaggcaggaggttctgtcatccatcctttaaatctgcacatgaaacgttttgtcaaagacctgggtatgtaattttggtcttggagctcaccagattactgtgtgacatccccggatatttttatcagatggagaactgaaatttctgccttgttaattgccttacagagacgttggtaaaactsttttcctcactttcttgttagttggtactgcctgagttaggagcagttctgctgtaatgggacactagttgtctgtatcttcagttatctggaattacagccatggggtgggggtgggaatggctgccattgtctttttttttcttttgaggagtttcgctcttgtcgctcaggctggagtgcaatggtgcgatcttggctcactgcaacctctgcctcccgggttcaagcgattctcctgccttagcctcctgagtagctgggattacaggtgcctgccaccacgcccagctaatttttgtattttcagtagtgacggggtttcaccatgttggccagctggtcttgaactcctgacctcaggtgatccgcctgccttggccttccaaagtgctgggattacaggggtgagccaccgtgcccggcctstgttgtctgttcttaaaattctgggtttgtgttaaagaatcagagaaggtttggagatagtcatctcattgtgatcattttgcagctgagtaaatgagacccagagacttgaattgtctggctcaaagtcactcacatatggccatggccagggtcagtggctcatgcctgtaatcccagcactttgggaggccgaggcagaggatcacttgagcccaggagttagaaaccagtctgggcaacatagtgagatcctgtctttactaaaaataaaaaagttagcctggtgtgatggcacaaacctgtagtcccagcttcttgggaggcagaggcaggaggatcccttgagcctgggagatagaagctgcagtgagccttgcatgccactgcactccagcctgggcaacaaagtgagaccctatcaaaacaaaccaccaccaacaaaacaaactccgtcacacagctgtggatgcagacacgtgcctagaacttgggatgtgcaactgctgccctgacagcagaggagctggataggtcatggggaaagtctgacaggcctctggaggccctttcggcagggagtattttgtaactttggcctccttccagttatctgaaatatccagttttgcaaaataggattctcacaggaatggaagtgcctcagctgccttccacatcctctgtagatgctgcctctgcttccgtttcctccacgagggcgaaggtatacccagaacaaattatgccacgaagatgcatgtctgacatctttgtttttaaattgaattcagttggtactctggcttttttcctttgactatccagtttttttagacttttagtctaaaaatagccaggtaaaaatatatctacttttgatatattaatatttacatgatcatctgacccatcgcctagcaaatctgcttttggacagtgtagtgaaagtatagtgtttcacactgttccaaagatagagctcctttatgtgtctcctgagaactgagggaagccccaaattcactcagattacgttctttcatttgatcagcatagacaccactgacttagctgtgctttatgtttttgcaggtctctctgctgttcaggcctctggtggcctactggggatatataatggagagactctggtatttgaggagagcaactggttcataattaacgtgattaaattagtttggcgctatggatttcaatycctccgtatgcacatgtgggtagaggacgtgttagacaagttcatgaggtaattttttttccttccatttaacctaagatcttttaatttaggttaaattaaacttgatgaactttaggaattatgatttcttgtaagcattttctacctcacagcaaggcctgtttataacattgttaggcaaaatgttttgtagaaactatgcagactatttgcttggatattgaaaggttggtttatttttgcttctgaagtgtattttgcaaatgcttctttagtgttgccagatactgttagatgccttgaattcttatgacaacttactctggtaggtactgtttttagcttctttaaacagatgcagaaggtggcggtgtagagaggttttaaaaggcaagttcacccacatagtaagtggtatagctggagttgccacccaggcagtctggcctttgagtcttcactcttaatctctatgctgtgctggtgttgtgtatatgaattgagataatgtgtacaagagcttgtagaaaggatcagaaaacttaaatggcctttaatagtgacatgttttcagtgaaccagcagcctgaagtagagtaaaagttccatattccaagaatttacattctagcactgttttgggtagtgagaattcaggtgcctctttttcgtccttatgcttttctatatttaaacagtttttttaatgcgtgtgaatatgtatcactttggtaatcaggaagactaacataaaatagccagtctaattttgaaaggtacaatctgtatttttaaagctgttggcatgttctagttttttagtttttttgtttttttgtttttgagatggagtttcgcttgttgcctaggctggagtgcaatggttcgatattggctcactgcaacctctgcctcttgggttcaagcgatactcctgcctcaggctcccgagtagctgggattacagatgcctgccaccacgcccagctaatttttgtatttttagtagagatggggtttcaccctcttggccaggctggtctcgaactcctgacctcaggtgatccacctgcctcggcctcccaaagtgctgggattacaggtgtgagctaccgagcttggccggcatgtgctaattttttttttttttttttttgagatggagttttgctctgtcgcccgggctggagtgcagtggcaccatctcggctcactgcaacctctgcctccctggttcaagcgattctcctgcctcagactcccgaatagctgggattacaggtgcctgccactgtgcctggctaattttttgtatttttagtagagacggggtttcactgtgttagccaggatggtcttgatctcctgacctcgtgatccgcctgcctcagcctcccaaagtgttgggattgcaggcatgagccactgtgcccggctagcacatgctaatttttatgctgctttacagttttaggtactggaggccaggatcgcatcattacactccagcctgggtgacagaacaagattccatcttgaggggaaaaacaaaacaaaacaaaacatgtcatatgaccaggtattgaacaggacaaatatgagttaagcagggctgggcacagtggcttatgcctctaatcccagaattttgggaggctgaggctggtggatcacctgaggtcaggagtttgagaccagcctgaccaacatggtaaaaccctgtctctacaaaaaatataaaaatttagccggcgtggtggtgcatgcctgtaatcccagctacttgtgagcctgaggcaggagaatcacttgaacctgggaggcagaggttgcagtgagccacgatcgtgccattacactctagcctgggggacagagccagactgtctaaaaaaaaaaaaaagaaagctaagcaggatatgctctggtttctataactcatggtagtttggggtttctttctttctcaacatcattcttaggtcagttccttaaatgcctttcccgtgggtaccttaagtccatctacagtgcataatgtttttaagtagccattcattcattcacccaatattgaatacctgttaggtgctaggcattgttctatgttgagagtataggacctacaacatgtccttgtcctcaaagaatatatattctagtggagagacaggcaatacacaaccaaggaaatatatagaatttgcgtagagacggccagtcactttatagaaggtgggtggcatggtgctgcatactcagcaggcagatcaagttctgatggcatcagccctgcttgtgtgtattgtttttcttttcttttcttttttttttttgagatagagtctcgttttgtcgcccaggctggagtgcagtggcgggatctcggcttactgcaacatctgcctcccaggttcaagtgattctcctgcctcagcctcctgagtagctgggactacaggcacatgccaccatgcctggttaattttttgtatttttagtagagatgtggtttcaccgtgttagccaggctggtctcaaactcctgaccttgtgatctgcctgtctcggcttcccaaagtgttgggattataggcgtgagccactgtgcccggccctcttttttttttttttttttttgatacaggtctcactctgtcacccaggctggagtgcagtggtgtgatcatggctcactgcagcctggacctcctgggctcaggggatctgcctaccttagcctctgtgtagctgggactacaggcacgtgccatcagatctggctaattttttgtattttttttgtagagatgaggtttggccatgttgcccaggctggtcttgaattcctgggctcgagtgttccactcacctgggcctcccaaagtgttgggattacggttgtgagctcctgttcccagccttgtttttttttttatctgtggcttgcttgagatgtagagaattgccctttgagaaattaagaaattacttttttttttttgagatgagtttcactctgtcacccaggctggagtgcagtggtgcaatctcggctcactgcaacctctgcctcctgagtccaagcgattctcctgcctcagcctcctgagtagctgggattacaggcatgtgccaccatacccagataatttttttatttttagtagagatggggttttaccatgttggctaggctggtctcaaactcctggccttaattgatctgcccgccttggcctcctaaagtgctgcgattacaggcatgagccaccgcacctggcctaagaaatcacttttgaagtgaattcaaggtattacagaactgggaaaaagaaccagtgaggggatacataggttatactgtttttgactttaaaaaataatttacgggccgggcgcggtggcacacgcctgtaatcccagcactttgggaggccaaggcagatagatcttgaggtcaggagttcgagaccagcctggccaacatggtgaaactccgccttgctaaaaatacaaaaattagctgggtgtggaggcgcagctaatgccagctacttgggaggctgaggcagtagaatcgcttgaacccaggaagcggaggttgtggtgagccaagatcaaagtatacacaaggtggagaaagacctatgtaacagtagtaaaccatgacactcgaaagagggctcaagcttgtggtaggcaatactcgaaaacagtgcattcattcattctctgctgttggaggtacttgagtggaaatcctgcagcccctgacatcagcactagctagcttaatttccacttctgcacatacatttatgtagttgttctggttggatgccattcttaactaattttttttttttttttttttttgagaccaagtcttgctccgtcacccaggctggagtacggtggtgcaatcacagctcactgcagctttgacctcctggtctcaagtcatcttccagcctcagctgggactataggcatgtgccatcatgcttggctaattttttaaatttttgtagagacagggtgttgccatgttgcccaagctgatcttgaactcctgggctcaagtgatcctcccaccttggcctcccaaagtgttgggattacaggcgtgagccaccgcgctcagccggatgccattctttactcccaagtccaacctcttatctcactttttcagcaaagcatttccttaatgcttcaatcaacattcatctttcttttcaaacatcccttattatacggtgcacactgtgtgcttgtgttctatgctacgcacagtaactagaatgtagtagatgtttactcagatgtttgtggaatttaaatctctggtctgctgatggcttcctgttgagatatcttggcttgtagactaggttaaagcttattcttctctctcaagttagtgcatttctggggacttgtaagatccttaacacttcttgatctgagactgatagactcacagggaaaggctttataaacaccctttcttccttccagttactcctaccaaatattttgagtcaatttttgttctttcatttcccaaacccactctatcttgaatcccatcagcctttaaaatacatccagtattccactacttctctccaggattactgctaccactttgttccaagtcaccaccactgtctcttgtctggattgctagagtagcctcctattataggctgaataatcctctcccctgcygtctgccacaagatgtccatgtcttaattcctggaacctgtgaatgtgttaccttttgaggtaaaagagackttgcagatatggttaaggatgggtagattattctggattatctaggtgggcccaatataatcacaagggtccttagagaggcaggaggatcagggtaggtagtaggagatgtgatgatggaaggaagagattggagtgatgctaggaaggggtgtgcgtccacgagccaaggaatgcaggtggcctgtagaggctggaaaagacagtcttccctcagagcttctagaaggaaccagccttgtgcacaccttgattttagcccggagagactgactttggtcttctaayttacagaaccgtaagattataactttttttttttttgttagtatttattaatcattcttgggtgttcttcggagagggggatttggcagggtcataggacaatagtggagggaaggtcagcggataaacatgtgaacaaaggtctctggttttcctaggcagagggccctgccgccttccgcagtgtttgtgtccctgggtacttgagattagggagtggtgatgactcttaacgagtatgctgccttcaagcatctgtttaacaaagcacatcttgcaccgcccttaatccatttaacccttagtggacacagcacatgtttcagagagcatrgggttgggggtaaggtcatagataaacagcattccaaggcagaagaatttctcttactacagaacaaaatggagtctcctatgtccacctctttctacacagacacagtaacaatccgatctctccttyctttccccacatttcccccacttctattcgacaaaacygccatcgtcatcatggcccgttctcaatgagctattgggtacacctcccagacggggtggcggctgggcagaggggctcctcacttcccagacagggcggctgctgggcsgaggggctcctcacttctcagagagggcggctggtcagagaggctcctcacctcccagacgggatggcggcggggcagagacactcctcagttcccagacggcgtcgcggccgggcagaggcgctcttcacatctcagacggggcggcggggcagaggcgctccccacatcccagacgatgggcagccgggcagagacgctcctcacttcctagacgggatgacggccgggaagaggcgctcctcacttcccagactgggcggccgggcagaggagttcctcacatcccagacgatgggcggccaggcaaagacactcctcacttcctagacggggtggcggctgggcagaggctgcaatctcagcacttttgggaggtcaaggcaggcggctgggaggtggaggttgtagcgagccgagatcacgccactgcactccagcctgggcaacattgagcactgagtgagcgacactccgtctgcaatcctggcacctcgggaggccgaggctggcagatcactcatggtcaggaactggagaccagcccggccaacacggtgaaaccccgtctccaccaaaaaatacgaaaaccagtcaggcgtggcggcgcgcgcctgcaatcccaggcacttggcaggctgaagcaggagaatcaggcagggaggttgcagtgagtcgagatggcagcagtacagtccagccttggctcggcatcagagggagaccgtggagagggagagggggagggggagggggagagggagagctgttttttgttttgagacagagtcttgctctgtcacccaggctggagtgcagtggcacaatcttggctcactgcagcctccgcctcctgggttcaagcagttctctgcctcagcctcccgagtagttgggatcacaggcgcccaccaccatgcccggctaatttttgtatttttagtagagatggggtttcaccatcttggccaggcaggtcttgcactcctgacctcgtgatccacccgcctcagcctcccaaagtgctgggattacaggtgtgagccactgcacccggccgtaaatttgtgttgttttaagccactaagtttgtggtaatttgttatagcagcagtggaaaaccaagacacctcctaaatcatctgccattactgttatattgctaccatttgttctcaggttagcagccaaagtagttctttaaaatctaaggctcatcacatcactccactaactcagaaaccttcagtggctatttcattaatagagatttatagccaaaatctgttttgtgactgagaagacatgacaggattctgtgctctcatcccttacttttaaatttgttttccccaaaattcataggttgaaacactagccacccagtactcagaatgtgactgcatatgtatgtagggcctttaaatatgtgattaagttaaaatgaggtctttagcgtagaccctaaaacaatttgatgggtgtccttaagattaggacacagaaaggaggccaaggcgggcagatcacctgaggttgggagttcgagaccagcctgaccaacatggtgaaaccccttctctactaaaaatacaaaaaattagctgggcgtggtggtgcatgcttgtaatcccagctactcaggaaggctgaggcaagagaatcacttgaacctgggcggcagaggttgcagtgagccattgcactccagcctgggcaacaagcgtgaaactctgtctcagaaaaaaaaaaaaaaaaattgggacacagaagaaacacacaaagaccatgtgaggacacagcaagaaggtggccatctgcaagccaaggaaataggcctcagaagaaaccgaatgcatccacaccttgatcttggacttttggcctacagaactataagaaataaaactttttttgtttaagccatccagtctttggtactgtgttatggcagtcttggtgaactaatacactgttgtcattttcagtaactgtccattattgaaaatgggatattgaagtctccattattgttgaactatgtatttcagttctgtcaagatcatttgatcatattcatgaaggtttatttctgggttttcttatttgtttcaaggatctgtgtgtctgtttttttttttttttcagatgatgttttactctgttgcccaggctagagtgtagtatgttcacagcaacctctgcctcccaggctcaagcaattctccaacctcaggccccttgagtggctgggactacagatgtgcactaccatgcccagctaatttttttttttttttttttgagacagagtctcgctctgttgcccaggctggagttcagtggcgctatctcggctcactgcaacctctgcctcccgggttcaagcaattcttgtgcctcagcctcctgagtaggtgggactacaggcatgcaccaccaaccctggctaattttttgtgtttttagtagagatgggttttcgccatgatggccaggctggtctcgaactcctaacctcaagtgatcctccagcctgtgcctcccaatgtgctgggattacaggcgtgagccactgcacccggccttttttaaaaagtttttttggtcagcctcttgtagtctctattgatgtcatagcctccggcatctgtgatgttaaacaattgccacagattttttttttgacacgtggacacgtgccctcaggatggggctgttgcatagagtgaactttgaatcaggtcgaataaagacaagccttcaggatagagctttttcggagctgccagataggtcaaatattgacagttctctgaggatagtgctttttgggagctacaaactcgttgtgttctctccagtggcttctagcttgctagtttcacattgcagttggaagggtgctggttttattttttatttttttttctctctctctttttctctttctttctttctttcgacggagtctccctcttgtcgcccaggctggagtgcaatggtgcgatcttggctcactgcaacctccatctcctgggttcaagcgattctcctgcctcagcctcctgaatagctgggattacaggcgtgtgccaccacacctggctaattttttatatttttggtacagatggtgtttcaccatgttgggcaggctggtcttgaactcctgacctcaagtgatccgcctggctcagcttcccagagtgctgggattacaggtgtgagccaccatgcctgccagacatttttcttgaataaatactccttggacttggaaaggctttggtttatctgcagagctctgaaagagtcaatgttgatcatttttggcagtattctcatagcttttatggaggagcagatttccagaggtccttcctctgccattctggaagtttcctctccccagtaacatttctggctgtaccactcccggttctcccatatcactctgcttcagctgctctggcttcattgtttcttgaatgtgccaggcaagcttctgtcatgtgacctttgcattgcttttacctctaccggaaatattttcccccaggtgtttgcctggtttgcatcctcatctccttcgggtctttggtctatatcatcttctcagtgaggcttttcctgaccactcttgtttttggacagtcttatttagaattcaaccctcctaaccccatgtatttctagtcttcttttcagaccattttctccttttttttttcttttgagatggagtctgtctctgttgcccaggctggagtgcagtggcacgatcttggctctcctcggctcaccttggctcactgtgccactgcaccactacgcccggctaattttgtatttttagtagagacagggtttctccatgttggtcaggctggtctcgaactcctgacctcaggtgatccacctgtcttggcctcccaaagtgctgggattacaggcgtgagccactgtgcctggccccagttatatttttttaaaaattattatttttttgtttttgtttttgttttttttaagacaaggtctcactctgttgcccaagctggatggagtgcagtggtgtgatcacagctcactgcagcctcaaccagcggggctgaagtgatcctcatgcctcagcttcctgaatagctgggactacaggcatgcctcaccatgcctggctaatttttttttttttttttttctgtaagtattttatttatcactgaagaaaaaacacagcagcaagttctgtgttggcttcaatgagaccaaatagttcatctttaacatagctactgcgctccaaaattgaagtcaacacagtcattactacaaattacttgttgaaagaatctatcttcaaaagaaagaaaattaggaaagagaatttaaacgattcctccaaaccatacatttataaatattgtcatatttaaaatgcttgaaaggcgtgaattctccattaatggaaaagcagtttgctattggcaacagaaaaaaactcagcgataatttaccaaatgctttaaaatttaaaagctatactgtttggattcacacttgcgcagtaatcttgtcattacaacaactgcaaattgctttgtactcaccttctctcaagtaaaatctaaagaaaaccccaccgtatccaatgtttgtaatgtttacttcaagtgaatctaaaaaatttctaaatttagtttatggtaaatacctcaaaatacctaaaaataggtacrtatcaaccacttaagggtgtgaaaattgtttcagattcactgctttaaagggtcttcaaatatattttctttaacagaaccttacttcattccaaattattatcagatatttcaaaataaaaaaaaagtatcagttctataccaagataaaggtgttactcaatacctgaaggttcacattttaaatttattttttagtttttcttttttgtcaacaaatgattgatgaaataatgcaacacccttaaattccagaaaatggcatggtttttccaacctcctgtggatatggtgcatgatcaatctattatataggagcctggctaatttttaatttttttttttttttttttgagagggagtttcactctgtcaccaaggctagagtgcagtggcacgatctcggctcactgcaacctctacctcccaggttcaagcgattctcctgcctccacctcccaagtagctggtattacaggcatgcgccaccatgcccagttaatttttgtatttttagtagaggtggggtttcgctatgttggccaggctggtctcaaactcctgacctcaagcgatctgcccgcctcagcctcccaaagtgctgggattacaggcatgaaccactgcgcctggctaatttttacattttgtgtacagacagagtcttgcyatgttgcccaggctagtcttgaactcctggcctcaaggtatcctcctgtcttactctgtcacccaggctggagtatattggctggctgttcacaggtgcaaccataatgtactacagccttgtgcccctgggcttaagtgatcctcccacctcagcctcttgagtagctgtgactacaggtgcatgctgcctcacctgggtgctgttttttagtagtatttattctgttttttcatttattattattatttttttgagatggagtcttgctctgtcatccagggtgtagtgcagtggtgtgatcttgacttactgcaacctctgtctcctgggtcaagcaattctcatgcctcagccacctgagtagctgggattacaggcatgcaccaccacacctggataatttttgtatttttagtagagatggggtttcaccatgttggccaggcggtctcaaactactgacctcaagtgatgctgccccactttgcctcccaaagtgctaggattacaggcatgagccaccatacccagcagtgtatttattctaatacgattagttgtatcatgaaacaattagagtgctctctgtttatattgtgtatatagtttcatctcaccgctgccaccccgccccctcccagggagacttgcttgagtgaggttgcagctctggcaggagcagttggggaatatgttttttatagcatcattagtagcttatttaattgactgttattttctcatgttgaccattagccaaagatcactcttctttggatatgagatatccaggctattatttttctgaagaattcagtgtttccatcctactttttccagtctcctaaagactgggacccaaatgctatggttagaaggtatttagtttctcagttttggcatagatatcgaatcagtttttccaataaaaatgtgtttaacattttgtacacttatactactactatgcttttagtaggtaatactgaaatggttataatactgtcccttgttctgtaaaaaaatatagtacattttgagagaaaaacttgatgtgaaagtttcccttccatgatcagtgatagggatctttccttggctcttaatttcttattttcatatacttatctctgcatgtgccttattacttatccctaactataagccccttaagggaataagagataaaccccgtattacttatcccaaacttaagcctgttttccatctttgtactatttgcaacatgaaaaattgtgtttgaattactgaatgcactaatttatgtgaatgttgttttaaatccataaaatgcagagaagtgttgggtgatatttttctttttggtcaagtgatgttttctaaaaaataatagaaagcatctaattgttgaatgagtggcattggtgctaagttttatgaggcttctggagatgatataactgtggactgggaagttgagcaagacttttcagagaaggtgggattcaagttctgttaaggaagaatagatgttccatggttaggaatgggaagtgtattcaggttggagggaagagcttgtgcactggtggggatacagcatgtagggcaaatttagagaccagtgaatgggtcaggtgtgctccagtggagactgtgcatgtgtgggtgattgacagcagagtgggcaagttgtgattgagccttatacttgccatgtggcctttagacaaagtattttacttctacttttttttttttttttttttgagatggagtctcgctctgttgcccaggctggagtgcagcggtgtgatctcggctcactgcaacctccgctttctgggttgaagcgattctcctgcctcagcctcctgaatagctgggattacaggcgtgcgccaccaggcccagctaatttttgtatttttagtagagacggggtttcaccatgttrgtcaggctggtctcaaactcctgacctagtgatctgcctgccttggccttccaaagagctaggattacaggcatgaaaccaccgcgcctggccttacttctactttttatttttcctttttcttcttctttctttcttccttagtttcttttctttttttttttctttttttttttttaagagacactgtcactgtctggcccaggctggagtgcagcggcattatcacagttcactgcggccttgaattccggggctcaagcagtcctcctgcctcagcctcccaagtagctgggaccacaggcatacaccactatgcctggttaatttttgkatttttagtaaagctggggttttgccatgttggccaggctggtcttgaactcctgacctcaggtgacctgcccacctctgcctcccaaagtgtggggattataggcgtgagccactgcacctagatgtcagtttgattcttatgacgccacttcccttctttatacatccccttccccacatcttgtttggtatttaatggatttctcttcttttccaaaggatctaccgctaccagtctcatgactatgccttcagtagtgtcgaaaaattacttcatgctctaggaggagatgacttccttggaatgcttaatcgaacacttcttgaaaccttgcaaaaggccggcttttctgagaagttcctcaatgaaatgattgctcctgttatgagggtcaattatggccaaagcacggacatcaatgcctttgtgggtaagccagggcttgaaacagtggtggacattagttcacagaggggcttacctgatgctatggtggttcctgactttaggctgtggattggaggctacttttctctgtgaacctcagacattgttagcaaaattgtgcgtatgtagatgtgcatttttagggggagagggtctttagctttcattagttcagtaattcttaactgggggagattttgctcccaggggccatttagcaatgtytagagacatttggagtagaacatgtaattgggaagggagagtgggtagagagcctcttacaaaaagtcagaattaaaacacatttttcctcctattgacaggggcrgtgtcactgtcctgttctgattctggcctttgggcagtagaaggtggcaataaacttgtttgctcagggcttctgcaggcatccaaaagcaatcttatatctggctcagtaatgtacatcgaggagaaaacaaagaccaagtacacaggtaagcttgaatttcttattgttcctgatatcccctgcagaaaatgattgctcagggagaaacacttctcttctgtcatctcttactcagttctaaaatgatgaaacttgaaattgtatatattgtaccatatagaaatattccccaatgggccaggcacggtggctcatgcctgtaatccctgtactttgggaggccaaggagggtggatcacctgaggtcaggagatcaagactagcctggccaacatagttaaaccctgtctctactaaaaatacaaaaaattagccgggcgtggtggcaggtgcctgtaatcccagctactcgggaggctgaggcaggagaattacatgaacccagggggcagaggttgcagtgagccaagatcacaccactgcactctagcctgggtgacggagtgagactccatctaaaaaaaaaaaaaaaaaaaaaaaattccccagtgtagttaagtgctgtggcatcactccttggatttgaaaaataatcttttttttttttgagatggagtctcgctcttttgcccaggccggactgtagtggcctatctcggctcactgcaagctccgcctcccgggttcacgccattctcctgcctcagcgtcccgagtagctgggactataggcgcctgcctcagcgtcccgagtagctgggactataggcgcctgccaccgcgctcggctaattttttgtatttttagtagagacggggtttcaccatgttagccaggatggtctcgatctcctgacctcgtgatccacccacctcggcctcccaaagtgctgagattacaggtgtgagccaccatgcccggccgaaagataatcttaccttcaaaagtaaaaattctgtattttgtacttactgacattctgaataagaaattggcctcaatgtaataaaaatgcaagggacaactatcttaagggatataacttcttcaattctttagaattatagagaaattatgaagaaggtatacaattatttttagaaggtatgttagaaacactaaacaaatatatgcctccttatttcctctaggaaatccaacaaagatgtatgaagtggtctaccaaattggaactgagactcgttcagacttctatgacatcgtcttggtggccactcckttgaatcgaaaaatgtcgaatattacttttctcaactttgatcctccaattgaggaattccatcaatattatcaacatatagtgacaactttagttaagggggaattgaatacatctatctttagctctagacccatagataaatttggccttaatacagttttaaccactgataattcagatttgttcattaacagtattgggattgtgccctctgtgagagaaaaggaagatcctgagccatcaacagatggaacatatgtttggaagatcttttcccaagaaactcttactaaagcacaaattttaaagctctttctgtcctatgattatgctgtgaagaagccatggcttgcatatcctcactataagcccccggagaaatgcccctctatcattctccatgatcgactttattacctcaatggcatagagtgtgcagcargtgccatggagatgagtgccattgcagcccacaacgctgcactccttgcctatcaccgctggaacgggcacacagacatgattgatcaggatggcttatatgagaaacttaaaactgaactatgaagtgacacactcctttttcccctcctagttccaaatgactatcagtggcaaaaaagaacaaaatctgagcagagatgattttgaaccagatattttgccattatcattgtttaataaaagtaatccctgctggtcataggaaaacacacggttctaattaagtgtgaaggtatagctattgcacttatgccatctccaaaatttcttaagtattctttcactatccattaggagtttttcttaaacttgtctgataataagaatcacctggagttaggaggtggtggttgcagtgagccaatctcaccattgcacttcagcctgagcaacacgagcaaaactccgtctcaaaagtaaataaaaataatcasctggagtttgttaaaccatatggattctcaagctcctctcttgaagattctgattcagtaggtctgggagtggcgcsctggattttgatcaaaattgtagagcattttaaggtgagtacctgagggagaacttaaagacatcttagttggggagtagtccttttgaattttacagctagatataatcttcagtcagataaaatttatgggagctggtgtcttatgcctgactcttagtaatttcataccggtttgaagtacgtgtgcccatgcctaaagccttgactttcagaatgttgtcttttgattcttctgtcttgatttgattaggggtgaaatttagaagtcttagtaatgtaacttgaagatgttaaacaaaaatctcaagtaaaatgaaaagcaaatatgggctactgaattaagaaactggcattctagtattaaatcctcacttcaggagcttttaaaaatactgagacccccccataaccagagattcagattcaaagactgaggataggaccttagcattgtagctatttaaagtttctaatgtgcacccagggttgggaatcaccaatgtgggtgtgaaaatgcctacaaagggttttagtgccttagaagtcctaagaagcccaatctgtatcaaagcagatccattttgcaaggatctttcttttagaactttctcagttctcttagtaagaactttagaagtaatcttgataataagcacagacagcctaacagcagaggcaacttaaataactcctgagcagttggcactagaacagaatacttggaatgacaccaaagttaaccaagtccagcatatgtccaaagagttaagtgtttcatttactgtagcattctgggtgagaaattggttgctgaaatcttaagacagtggtctcaaccttggctgcacattggaatcacctgtagggttttaaagcatccaaatggtaattaacaggcagcaaaacttcagaactagttctgcatctactgtgcaaagatcatgattaactgtcaagacactggtagaacagaacaagcaaaagattaagagttcaaaagtaaatgcaaccaatttaacatgtagtgttattaaaaaattacaaaggcctagaccagcctgggcaacatggtgaaaccccatctctacaaaaaatttttaaaaagttggccaggcatggtaatgcgcgcctgtggtcccagctgctcgggaggctgaggtgggaggatcacttgagccttggaggtcaaggctgcagtgaatcatgatcatgccactgtactccagcctgggcaacagagaccatcttaaaaaaaaaaaatccttccattgaatagaaacttcaaagtccttcatcagatcatggcattagctactttagcaaaatagtgtaaactttggttctgagtaaaaatgacttcttccctaccacagttgtgaatgttaatatgctgataaaactgccaagatatatttgataggtaggggattaaactcatggtttgtcaaaagagtgtttttttctagttttattcttaacagatatgttgaggtattcatatttgtttccttttgtggttttaatgaagacaatttgtaaagtaatactgttatgtatatgctaaatgttggtaaatactaattaatttccatcatttgtagacttgttttgcaatgggatatatttttacttataataccaatttaggctgggcgcagtggctcacgcctgtaatcccagcactttgggaggccaaggcaaacggatcacgaggtcaggagatcaagaccatcctggccaacatggtgaaaccccatctctactgaatayacaaaaattggctggacatggtggcgcatgtctgtaatcccagctactgtaatctcagctactygggaggctgaggcaggagaattgcctcaaccgggaggcggaggttgcagtgagccaagatcgcaccactgcactccagcctggcaacagagcgagactctgtctcagaaaaaaaaaacaaaaaccagtttaggctgggtatggtggctcaccagcactttgggaggctgaggcaggtggatctcttgaggtcgggagtttgagaccagcctggccaacatggtgaaaccctgtctttactaaaaatacaaaaattagccrggcatggtggcgtgtgccagtaatcccagctacttgggaggctgaggcgcgagaatcgcttgaaccctggagatggaggttgcagtgagcagagatcgcaccactgcactccagcctgggcaagagtgagactgtgtctcaaaaggaaaaaaaaaaaattaaaaatgttgctggtattacatcaaacctactctggataaattttccagtagggcatctgaaattgctttggcaaaagcaaaacaggttatcaatacaccaaggacatcaagtagttttaatgcaactacagtgttgagtgcttttttactgggagaaaaatcctagcagaacctgctactctgggcgcattaggtagttttatgcaactatagtattaagagttttattggaagaaaaaacactgtcagagcttactgctccagacctttttttttaatagaagagactggtaaaaatgatgcaggggctgaatgaaagccagctctgctccagtggctctctgagttgagcatgcatcagttaccttaagggcttgttaaaacatcgctaggctccaccctgtttattcaataagtttgttatgggatataagaagatgcattttattaagttccccagtgatgctgctgttctactataggaaccacacttgaagaactagttctacaattcagctgtatgttgtaaaggagtcaagtcaatgaaggagttataaagagttgctgaaaaatggagtaacagtgtatgggacttcacatcagttctccttattgattgttagtttgatccctcttgttcttttgttgtaaacattttctataattaggaaatgccatttaagagtgagagaggtatatatctatgagccattgtgtttggtgttttacaagaactttaccatactggtgtgtagtccattctgtacagtttaaaagtgattcacgatttgcaggctttttatcagatcacaaaaaaatcagtctttaagcatttgcttggtaaggtttcttaagattaggtttataatacaaccatctgtaatgtatctctcgtttgagcttgtgggccatacaattcattaactagatgaatacattgtggacagcatcctcactacccctctctactcactcacaaagaaccatgatacactggaatgtttttctctggaatcctctttctactcttgtattaaaatttttccccacttcatgattatattcaaaataaacaactacatcattacttcttgtcttttgcttctgttgtactatatttggaatgtagatgtacttgggaaagtcagrctagatcaaagttactattcttacaagttttgaaaattagtgttttagaagaaactcactcatgtttgtaacttctttatctgttcagtgttgaaagatgatggacagaaggaatccttgccatgtttcacatttaataagattctttcactttaatgcataaaaccctttgaaatcaatgtcaaccaggaaaattcatgttagaaaaaactggaatgagagctgatattctatattcagaacatctgagaaagcatttttgactattacaaaagtttatttaacaaaaagtctaatatgaaaatgtacatgacctaatttttacatcatagtaaaacaggccctatggagagaggacatgggtttctctgctgaacagccattatttatactcgttccaaggcttctaacatgatgatactatttcctcgtattacctaagaaagagaaaaataaatttgaaaagaacaactcaggtaacagacataactatgatgatttaagaattttcaccaaatcattaatggttttttaatattacatgtcggtttgcaaagctttgttcaagccacagggacaccaaacaactctaagccctttatacgacagacatcttttggatttaaggctaacaatttgctttatgagattctaatgccaagtctccaatgactaatttcacctttttttttgagacagtctcactctgttgcccaggctagagtgtagtggcgcaatctcggctcactgcagcctctgccacccaggttcaagcaatcctgcttcagcctcccaagtagctaggattacaggagccctgaccacgcccagctaatttttatatttttggtagagacggggtttcaccatgttggccaggctggtgtcaaactcctgacctcaagtaatctgcttgcctcagcctcacaaagtgctgggattacaggcgtgagctactacgcctggccctaatttcaccttctaaaatgcaggactcaaatttaaatgcccatccctgactctatgggatccaaaaattaatgagtaaaatatgtacagtagagtatgttaggtacagtttggaggtatgagatcatttagggaagaaaccaggatgggaaattgtgaaaggcatgctttatgaaaatgacattttacctgggtcttggaaattgggcagaattttgaaaaggagattgtaggaaattctagacagaactaagatgaagacaaagtatgagaggataaggaagtaatctaatttgaatgcagtaaaaagttcacgaagagaatcaggaaacaaagatagttggcattcaatcttggaaagcttcaaatgccaatcttagtgtttggaggacatcagaaactaacaatgagccagtgagagtttcacttgggggaatgacaaccataagtgtccctgcaacaagatattatataaatacgccgaagtttgaataggacagaacctagaggcagaaagagaagttataaaaaaaaggccctaggagaacagtgcttgacctagtagataagccataaatgaagataagaatatttatcgggggtgtggtggctcacgcctataatcccagcactttgggaggccaaggcgggtggatcacctgaggttgggagttcgagaccatcctggccaacatggagaaacccccatctctactaaaaataaaaaattagccgggtgtggtggcacatgcctgtaatcccagctactcaggaggctgaggcaggagaaatcacttgaacccgggaggcggaggttgcggtaagccaagatagcgccactgcactccagcctgggcaacgagcgaaactgtcttttgtcaaaaaaaaaaaaaaaaaaaaaaaaaaaacaacaaaccaaaaccaaaacaaaccaacagacaaacttatcagagtatagatgaatcagctggtaaatgaattcaagaggggtagaaaaataagcgaaactggaaggctaggggactaaaaacagtaagtccctaatagactggagatcatcataatcgatagatcacccatcagtcaagtagaattggataggtgaatggaggggtacgggagggaaagaataggtaatgtaggggagagaaaggtaatgtaataatttgaggtgtttattagaaatggaggcattccaaaaagattcaaagtggagctatgcttataggcagctagagtaaaagtagttgtaacttattcttttctcacagtatcatgcttgttttatttacacatacgctatgatttattgtgttctccatacaaatgtaaattttatgagggcagggacttaggtgcaaaaccccagtgcctaaaatagtagcaggcacacagagggctcaataacctggtaaatatgaataaaagaactcacatgtgattactgcagctgacagaatagaagggaacacaattggtaggataagtgtcttggaacctggcagccaattatcagcaatgagtatgataaggtagtaaagagcagatttaaaaaagaatggctgggcatggtggctcacgcctataatctcagcattttgagaggcccaggtgggcagatagcttgagcccaggagtttgagaccagcctgggcaacatggtaaaaccctgtctctacaaaaatacaaaaattagctgagggtggtggtgcacacctgtggttccagctactcgggaggctgaggtggaaggatcaactgagcccagggaggttgagaccacagtgaaccaagctccatgctactgcactccggcctcggtgacagagtgagaccttatctcaaaccaacaacaaaaaccagtaaacacagtgccctgaaaatgacaatgggaactgaaagagtctaaagattgacactcttcttctaagttaacagagctcccctccatttttttgagactgggactagctatgctgaccaggctgcagtgcagtggctattcacatgcacaatcactgcacactgcatcctcgaactcctaggctcaagtggttctcctgcctctgcctcctgagtagctgggactataggcgcacatcaccatgcccagcataagccaggagtagaaacatgcttacctagttatcagaattttattttcattttaattattattttttttgaaacagggtcttgctctgtcacccaagctggaatgcagtggttcaatcacagctaactgcagccttgacctcctgggctcaagtgatcctcccacttcagcctctcaagtagctgggaccagaggcatgagccaccaagctgggctaattttaaaattttctgtagagacagggtctcaccatgttgcccaggcttatctcaaactcctagtctcaagtgatcctcctgccttggcctcccaaagtgctgggattacaggtgtgagccactgtacctggccagttatcagaattttaaattctcaattttttttttggcaacagatattgaacatcacatctcattgaccaaagcaagaaaagctagccttcctgcctagctccctgctaaatttacatatttgtcttgtcacataatatttagaaaataaggctaaatggtgaactttgtcccaccttatctgtggtccaaaaacattaaatgcatagtcccagcaacagacatccgtaagttttacactgcatgctgttcttagcagtgtgatgatacctcatactgtccctggatgtggattatcctttgtctagcatctccatgctgcccattaatcagttatctcagttttatgattgactgttgtggtatcaaagggttacttgtgttcaagtaaccctttttttaacttaatactagcctgaaagtataagagcagtgatgctggcaatatggatatgccaaagagaagctgtaaagtgcttcctttaagtgaaaaggtacaagttcttgacttaataagaaaaagaatcatatgttgagactgccaagatttatggtaaggacgaatcttctatctgtgagattgtgaagaagtaaaaagaagttcgtgctggccaggcgcggtggctcacgcctgtaatcccagcactttgggaggctaaggcaggtggctcatgcggtcaggagtttgagaccagcctggccaacatagtgaaaccctgtctctactaaaaatacaaaaattagcttggcgtggtggtgtgcgcctgtagtcccagctactcgggaagctgaggcaggagaactgcttgaacccaggaggcggaggttgcagtgacccgagaccacaccattgcactccagcctcggtgacacagtgagactctgtcatacacacgcgcgtgcacacacacacacacagaaatttgtgcatagggttcactactatctgtggtttctggtacctactctgaggataaaggaggcctattgtagtgctcttcctcttttgccactgtgtttgaggcctaattctccaaatcaaacttgaaccatcaggtccagaattacatactgctcccttttttgtgcttcaatgatgctacagaaggacaaccctagcaagagtgcctgaactatgtaacataataaaaagtaagatagaggcgatgccactgacaactctggggatgtctcagaagatagttgagatttatcattaggtaacgatccaactgacaggttaaaaacaaactcactcctgaaaacaaacacatcctttttgagacaggatctcgctttgtcacaaagattggagtgcagtagtgtgatctcagctcactgcagctttgacttcctgcctcagcctcctgagtagctgggactacaggtgcacaccaccatgcccggctaattttctaatttttttgtagagatgaggtctcactatgttgcccaggctgatctcaaactcctgggctcaagtgatcctcctgcttcagcctctcgaagtgctgggattatagatgtgagctactgtgcccagccaacacacacataactgcaataaaacagtattaagtaatttcaatggcctcaatggatcactgacttggacaaggtaataatgaagccaactgtcctttgttaaacaacttctaacaaaataacaaaaccttaacctatttgtttcccttcttccaactttagaaaagtcaaaaagttcatctctgttcttgccttttaaaatgtcttttattaaagaagtctgatgtgttattatttctttttcaaagtgaagactcagcagcaagaattactgtctgctgataaaaacttttttttttctttggctgggggttggggggcgtgtgtgtcacataaacctcagagatggaacaggaggctgcccaacacactaagtaggtaatcattacttaaatgacttgggatggcagtgctttcaaccaatttctgtgcaaagaaaataaagtccataaagtttagggggaaaattgccagagggatgctctattccttctctgataaaattccaatgagcagtgtgttacataattctctaatcttctcaaagcagaattgacaattaggtgccaagttcttcctgaatccttttcagcaaattttttgcaaggaactaaaaacctaatctaccttctattagaatgaaaatttatttgtaaaaataagggctgagaggaaaatcttggggtatctagaaaatgtttttaaaaggacttggctactaatcatgctggcagccttattcaacagaagctcacaagggaatatacctgaaagacaagtcaatttacatgaaacttgggggtacagtgtggtatctggagactctaaactgttttttcagtcataactattgatttgcttttcaaaatacagtaatgaaaaagtatctgaaataagtaataacacaaaccttggaaagaatggtatgtaaaaaaattaaacaggcagagatgtcaaaataggtctatcttcaactttactgctcaaacttaaaaatcaaggttaataaatcaaggctaataattagcaactcttaccactccttggaggtctttatgcttaataatttgctaaaagtaagttgtcctttttggttca

SEQ ID NO: 93487 - DNA, 24427 bp, Homo sapiens
aggccttttgtccccatttgccatcatatgaataggatcccctggcatcgagccaaaagtctattatgttacttttttcccaaaggtgtgagtggtgttttgaatggaggagttcaatagtccttactgcagaccctatacaggaaagacagtaagtacaatagtccctgtctcctggaataagttggggctggcaaagagagaaatgtcctaggccttctaataaccaatgacagaccatgtgtcgtcctggatgttgacctgagtgccagatatgtggaactggtcctctatatgcatattgctggtcatttctatatgagtaggcctgaggaccccatgggcaaggatttgacagctgccaccccaggcattttagatttttaattcagaggtctttgattttgggggtggggaacattttggaggacaaggcctgaaggaagttgtttttatagacagcaggtcctcagagattatggtttagaggaacgggtgaagcaggcctggaagtatgtttggacagccgtttggagggggtgttgcayagaagcttggtcttgtctggatgttgccaggagttcatcactggtttagtcctaaaggtgagaaggagtataataggacgaggaatagaagtttaggctgtggggagattttggggcaccggatagtaccatggggttgttagaagcagcaactgcagtatggaatgattggtgatggcctggatgcggttttgtgtgaattgagggactaaatgaaagacaaaaggcccaaataagagaaggagaaaaacaggtaccaggggactaagagtaggaaggagccaagacgcccagttaaaaagtgcccaggtaggtccagcataattatttgcctggctggcgagttttggggccctaactttaagcttttttatgttgtcatatagcaggctggattgatttagataaaaacaacattcttcatttaaaaatatgcagagttctcctttttcagcagtgagtaggtcaaggccttggtgattttggaggacaactgcgactaaggaaccgacctgggcccgaaggactgataaagtttgtgatatatctgtaatgctagcaggaaagtcattagaaagacaatggaaggttgtgacagaagttgaaatgccaggtaggtcagagagatacagtcatgggggtcaggtgtggtatcaggaataatgtgggaggccggattgaagtctgggccaggaacaatggtaattatgggagactcaacaaagagtgagtatagctgaaggagctggaggggcagaaagtatatgcatcaggtttgaggaagaaaatagattttgaaagttatgagaactgtagagagtgagttgagcatagtttgcgattttaagggcctctaaaagtattagagcggtggcagctgccacacgcaaacatgagggccagcctaaaacagtaaggtcaagttgttcagacaaaaaggctacagggcgcggtcccggtccttgtgtaagaattccgaccacacagccctgtacttcagctgtgtgtaatgaaaagggttgggatgagtcagggagagctagtgtggtagcagtttctagagctgttttcaaggaatggaaagaggagtggggaaaggatttaggatctgtggggttggctaggtttccctttctgagtttatataatggtttcgagaataaatgttgaaggagcaggagggtgtcttgttgagaagatttaaaggaggggctacaaagtagaaggtcatcaatatattgaataaggtgagaagcagaggggtggaaagaaagtaaatcatgagaaagagcttggctgaaggaatgagggctgtccctgaagcctcgtggcagtacagcccaggtaagttgctgggactgatgggtgtcagggtcaatccaggtaaaagcaaagagggctgggacgaggggtgcaggggaatagtgaaaaaagcatctttaagatcaagaacggaatagttgtggaggaaggtattgaggacaaaagagtgtacgggttgggcaccacagagtggataggcaaaacaatttggttgataaggcacagatcctgaattaacttgtaatacttgtccggtttttggacaggtaaaatgggggaattgtaaggagagtttggaggctttagaagcccatactgtagcagacgagagataataggctttagtccctttaaagtctgttgtgggatgggacactggcactgaggggggtaagagtgattaggttttaataggatagtaatgggtgtgtgatcggttgctagggagggagtagaggtatcccatacttgtgggttaaggtggggggatacaagaggaagaagtgaaggaggctttgggttgggaagaagggtggcaatgagatgtggctgtcrtccaggaatagtcagggtggtggataattttgttaaaacatctcaacctaataagggaactgagcaggtgggaataactaaaaaggagtgcataaaagaatgttgtacaagttggcaccaaagttggggagttttaagaggtttagaagcctggctgtcaatacccacaatggttatgtgggcaagggaaacaggtccttgaaaataaggtaatgtggagtgggtagcccctgtatcgattaaaaaggggacagacttaccctccactgtgaaagttacccgaagcttggcatccatgatggtccagggggcttccaaggtgatcgggcagcgtcagtcttcagccactaagctgagcaggtctggtaaggagtcagtcagagacccttgggccagagctttaggggctgggctctggaagtggctgccgggtgagctgggcggtctgatttccagtgggtcactgcacagatggaacatggcttgggaggaatcctgggctgcaggcattccttggcccactggccagatttctggcacttgaagcaagatcctgagggaggaggtcctgtaggaaagcctgaccactgcagcttaggcattttgaagttcttgtgtgccggaggtgcagctgggttttgtctcacagcagaggcaagtaattgtaactcagaaatgtgtttctgcttggctgcctcttctctattattgtacacattgaaggcgaggttgattaattcctgttgtggggtttgagggccagattcaaatttttgaagcttttttctgatgtcaggagctgactgggtgatgaaatgcatatcaagaataagacagccttctggcccttcagggtctagggctataaagcatctaagggtagccaccaaacaggccatgaactgggctgggtcttcatctttaccttgggtagtttctttaagtttgtcataattaacagatttgtatgctgcctttttaagcccttcaactaggcaggaaatcatgtaatctcacctagctatacctgaggaacctgcctgatagtgccactggggatcttctcagggaaccgtctgtaataccttcctggaggcctggctcataatgccagtgggtgtctgtgtgggactaggctagaggaaacactctttcccattcatctggggagagggtagaaattaggatgacatttaagccactccaggttaaattgtaagactgggttaaatactggaattcatgtatatatttggtggggtctgacgagaaggagcctaagtgttgattaatttgggaaaggtctgatagagaaaatggtacatgcactctgacgatgccctcagttccagccacttcttgaagaggaaattattgggcaggtgggggagtatttgccgcagaacgaaattgtaagctggaccaggtgtggggaggggagatgatagaagggttgtagggtggggaagtggaggctgaggaagagttggaagctgattcagcctggtggggagcgacctgaggaggagcagtctagggaggagggtagaagtcagatgggtcggtagaaaagaaatattcaaaagactcaccggcacttcaggttgggactgaagggacaggcgggagggaaagaaggaagatttgcggcaagtcgcactgggaacagagattagggaaggaacgaagtgtaaaaaatgcctggatgtagggcacctcagaccatttgcccattttatgacaaaaattatctagatcttgtaggctggagaaatcgaaagtgctcttttctggccatttagagccattatcaagtttgtattggggccaagtggtgttgcagaagaaaataagacacttaggttttaggtcaggtgagagttgaagaggttttaagtttttaagaacacaggctaagagaggaagaagaaggaatggagggctgaaggttgcccatagtaaaaaggtaagtttagagaaaggaggaggttgagacatggagagagggggggtggtacttgccacccaggggaagtggtacttgccaccaaggtggaagatcaaaacaggtgtccccgcagtgatcgaacacctctgaaatgtgggtgaataatcaggcaggcgtccctgcagtgactaaacacaagggaagacagtcttcccgagtccatgaccagcgccagagttttgggtccacagataaaacgggtctcctctgtctctaccagacagggaaaggaaccgaaattaagggaagggagagactgaagggtggtgccgaaattgaaaggagaaagaggttgagggatagtgaaagaggttgaagaagagagtagaaagaggccacttacccgatttaaaattggtgagatgttccttgggctggtctgaggacccgaggtcgtaggtagatcttcctcacggagcaaagagcgggaggacaggggattgatctcccaaggaaggtcccccgatccaagtcatagcaccaaatgtcaaatgcatccgtgtgaagagaccaccaacaggctttgtgtgagcaacaaggctgtttattcacttgggtgcaagtgggctgagtccgaaaagagaatcaatgaagggagatggggaaggggttgctttataggatttaggtaggtaatggaaaattacagtaaaaggtggttgttatctattgttagcaggggagggggtcaaaaggtacatgatggggagatcataagacttattgtccagaagaagaatgtcacaaggatggttgatcagttaaggtagggcagggaccagtcacaatggtggaatgtttgttaatcagttaaggcaggaagtggctgttttacttcttttgtgggtttttggctgccccagacttcttggctcccgcaggccatctggacgcatatgtgcaagtcacaggggttacaatggttgagcttcggctgagaggcctgacagcagagactggaaaattgcttaacagaattataaattccttctttcattactcaaaccttttttttttttctttttgagacgaagtttcgctcttgttgaccaggctggaatgcaatggtgcgatctcggctcactgcaacctccacctcccaggttcaagcgattctcccccctcagcttcccgagcagccgattatgctgcctcagccttcccagtagctgggactacaggcacccgccaccacgcccagctaattttttgtatttttcgtagagatgggatttcaccatgttggccaagctggtcttgaactcctgaagtgatccgctcacttcagcctcccaaagtgatgggattacaggcgtgagtgwcggcgcctggcctcattactcaaacctttagggaacacctcctcactcagccatgtgtaaggacgtgaagacccagaggtgaaacattttagggtgctgcctccgaatctgaatttcaacaatagactaaaacgatccagtcctgggcttctctaaattcttttgttgctggccagaccttaattttaggctttggagggtgtgtctatgcgaatgaacgactgaaaactcagaaaacgaaaactagcttttatggaatttcaattaattacgtttatcaaaactacgcatcatgcccatttgtgggtattggatgaaaagataaatctttccagaaggggcaggggagggagaggcaattstggttggggaagttgggagaaaagaaaatcagtatctcstagtcttcgcccagtttggctcgtttggggtactcctcgaccccgcgttaccaggcccgtgaatcccactcccrccagagaattagcgcgggcggacgagcaaagtgaaacttagtagcccggaacttcgcgtgccgggttcccgcagcaacacgtaccgggaagcgtttgggcrctgcaccgcgctgcgccgtgcccgtgagtccggcgcgcagaggaggaggagaaagctgaccgcttaggccsgggtagtggtcgtcgtggttttccttgtagttcgtggtctgagaccaggcctcaagtggaaacggcgtcaccatgatmgcacggcggaacccagaacccttacggtttctgccggatgaggcccggagcctgcccccgcccaagctgaccgacccgcggctcctctacatcggcttcttgggctactgctccggcctgattgataacstratccggcggaggccgatcgcgacggctggtgagtgctgcgcggccgggatcggctgggaggagaaggggtcgtagggctgcagactggcccggccgtaggcccccctgaggtgctctgcttttccgtgcctttttgcctagctggccccatctcgcctttccggggagtccgcgccccattagctctttagaakcaagcagagccagagtgtcatttggcacttgaagaaactgaggtgcagtgaagcaggaactgagtctgtgaaggacccgaaactactctcctcagttcgtgttgtgctgtgtgcgcaaatgagccatgactccatgccatgcactactcacactgtgggcattattgatagcatttcggccttaaaacacttttagggatgtattattcacaacgaggaaaccgagcctaacagattaacagcagcttgcccaaggtcatatggctattaagtagcagagcttggttttttttttttttttgacctctgaatggatatkggacaccagtgcttctcaaacttaatgtgcatacgaatagcataggtgtcttgttaaaattcggattctgggctgcgcgaggtggctcacacctgtaatcccagcgccttgggaggccgtggcgggcggatcgcctgagctcaggaattcgataccagtatgggcaatagggcgaaaacccgtccctacaaaaaaatacaaaagttagccgggcgtggtggtgcacgcctgtggtcccaggctgagggaggctgaggcaggagggtcgtttgagcctggaaggcagaggttgcagtaagccgagattgcaccattgcactccaacctgtgcaacaaagtgagaccctgtctcaaaaaaaaaaaaaaaaaaaaaaaaaaaaaaagcggatcctgattcatgaggtctggggaggaacttgatgttaacaacaagcgctcaaacactgctgctgctggtctgaggaccacggtttgaataggaggctctaaaccagtgtgctgtacttcccagtagtatgtcactggcctcctatcagagacactgactattctgataataaccaccacagtagctttgctaagctctatggatttccagagggaraagaggagaggaactttggaagaggggtctttgaagttaactttgattatcaggcaggactgagagacagacagctttctaggcccgtggggctagtgggagctaatgggggcaaggacctctgaatggagggtgtttgatgattgagtgagtgttcaggtttagataaaactgcaagggagattttagcagagcatggcaatttattttmtagrcagtcaggaactttgtaagcttttgagagctgcaagggtgcagtgatgagctstgtattttaaaaagtcatctttgtcagcaatgtgaggcgttgattggagccaagaagcacaatcaggaaaaaagctcaggcaatggttcaggcaattaggagtcaccacacttgtacctcttttgccttcttacagctgtatgtcatgcctgaaggtcagctcccaacccatcaaatcccacatttccagtgctcaaatagtattgaagtcctatctcccttggacataactcctcacttcagaaaggagtcatctttgtccgtttatgcctctgaggactcgaggttttcccttttcatcaccacttcatatttgcccaagactgtcacttggtgtaatgaaaagagctccactttggaactaaacaaacttgctcactaggcacaggcactgtggttcacacctgtaatcccagcactttgggagaccaaggcaggaacatctcttgaggccaggagttcaagaccagcctgggcaacatagtgagaccctgtctctacaaaaaaatttaaaaaattagccaggcatggtgatgtgcacttgtagtcccaggtactsaggaagctaagggaggagaatcacttgagcccaggaggttgaggctgcagcgagccacgattgcaccactgcactccagcctrggcaacaaagttgagaccttgtctccaataaataaataaataaacagacttgctctgctgctttccagctgtgtcactttgggcaagttacatggtcaggtcgatcagagccaaagtttcctcatctataaaataagaataattaatttttgcatatttgttgtgagaattgagtgagattctgtaggtaaaatgtctgacatgcaaaaggtgctggacagagttccccttccttagctcttgttatgcaaacagtttaccatatatttgtaaattgttcatttacagaaccctttttttttttttgagacagggtctcactctgtcacccaggctagagggcagtggtgcactcatggctcactgcagcctcgacctcctgggctcaggcgatcctcctatcctagccttccaagtagctgggactacaggtacataccaccaggcctggccaattttaaaattttttgtagagatggggtcttgccatcttggccaggctggtctcaaacttctggcctcaagtgatcctgccacctcggcctcccagagtgctggggttataggtgtgagccactgtgcctggccttacttaactgtttctctgttatgtgccctatggagctcctagtgaaatcagggagacaaacaggtaaacagcctgttgctgatcttggtatgatagatacatgttttgatagaggtgggtgagcagaaagcactttaggagcacaaaggagatacagttgggagggagaatgctctagaggaagtaaaggttggctgaaatgtgacgtatgtaccacttaatctcgttgttagtttagccgtttgtgcctttctgggagacagaagagtatagcagttaagagcatatgctttggggtttgacatcacctccaccctactagtaatttgattctgaggaagttacctatctctgaggactggatgagataatgaatataaactgcttagcccaggagtagggatcagacttcctgagttcccagagcttccctaaattgctttggaagatttaggtcctaggactttgttgaaatggttgtcctcaacagcatttactgaatgcatattgtgtttatctagctcagtgtctaatatctatagtaggtgttcagtaagtattgagtgaggtcacgtgtggtggctcatgcctgtaatcccaacattttgggaggctgaggcgggtggatcacctgargtcaagagttcaagaccagcctgaccaacatggtgaaaccctgtctttactaaaaatacaaaaattagccaggcgtgatggcacatgcctgtaatcccagctactcgggaggcwgaggctggagaattgcttgaacctgggaggtggagattkcagtgagccgagattgtgccattgcactccagcctgggcgacagactgagactctgtctttaaaaaaaaaaaaagtagtattgagtgaataagtatatgtagattacaaggaatataaaacatggtcccaatcctccaaaggtttacagaccagatggccatatccattaaaaagacaaattgtggtacaagattgtgcatatagagtgaaggtgtgtgtcacataaatgatgtttctaagacagttggaggagtggtggaagagatatggtagattttcaaactacagccctggcgagtacctggcattctgtgagtaatgggatattctggccggacaccgtggctcacacctgtaatcccaacactttggaaggctgaggtgggaggattgcttgagcccaggtttcaagaccagcctgggaaacacagggaaactttgtctctacaaaagaaatttttttaagctatctggacgtggtggcatgcacctgtgatcccagctacttgggagactgaagtaagaggatcacttgagcctgggtggttgaggctgcagtgagtgtgatcatgcctctgtattctagcctaagtgacagagcaagattctgtctcataataatgaatatgtctcataataatgaatttctatcaatgaaataaaattgtgtagctctttttcaaattagcaggaaatgttaaaataattccttaagaataagactttaaaaataagttgtacgtattttgggggtacatgtggtattttgatacatgcatacaatgtgtaatgttgaaactggggcaaatgggacatccatcaccccaaacattcaccccttctttatgttgggaacattcaaattcctctccttcagcaattttgaactatacaacaarttattattaactgtagtcaccctactgtactatcaataaatagaatttttttataagtttttctctcatcatctgttttttaaaacttaaccttcttgctggttaccacttaatgtgcccgaaatttagagttagttggtatgctaagtatagcccacaaaattaaatatttattgatctctagtttatcagtaatttatgatgttcttcaaagagcacaatagctgccggggttagactcactgagtaaacaatgggaaaatgattgtagatggggtgtgcaggtagtgagaggtcgaccactaagagagaatgaggagagaggttaggaaaatggggccttggcaagaggccaagccatgcctttagggctaggatgctgacatcatcatctcgaacgcttatggrgtctttctgtgaggaacrtgggtcagcgtagagagagtctggttctgtgtgtctctgcagtccagtggcacatgggagaacatgcactctttggtttgctatatggcgggtagcccattakggaaagcagtggctgtttggggtaagagagagtgctctgtccagttctagaacataggaatatttttcatttttaktgttttatacattttcggaaatacttttatatgcatatgtcttgttttatatgctactactgtgagaaagataggataggtctttttttgtttttttttttgagacagagtctcattctgtcgcccaggctagagttcagtggtgtgatcttggctcactgcaatctccacctcctggcttcaagcgattctccagcctcagcctcctgagtagctgggactacaggtgcgtgctaccacgcccggctaatttttgtatttttagtagagacggagtttcaccatgttggccaggctggtcttgaactcctgacctcaggtgatccacccacctcggcctcccaaagtgctgggattacagttgtgagccaccacgcccagccaggataggtcttgtctatgttttagaggtagtaaattgaattgcccaaggctgttcattcatttattaaataaatattaagtgctatatgctaaaatatacattgcatgtaatattttagatttgttaacctttaaagaagtgataatgtgggccgagtgtggtggctcattcctgtaatcctaacactttgggaggctgaggcagggggatcgcttgagcccaggagttcaagaccagtctgggaaacatagcaagacccctcttaaaaaaaaaagaaagaaagaaagaaagaaaaaaggcatggtggtgcacgcttttggtcccagctacttgggaagctgaggtgagaggattgcttgagcctaggaggttgaggctgcagtgagctgtgattgtgccactgcacgccagcctgggcgacagagctagaccctgtctcaaaaaaaaaaaagaatatgtagggtgtctcaaagtcagggatcaaggcggtttgttcagaatagctttttttttttttttttttttttgagacagagcctcactccgtcccccaggctggagtgcaacggcgcgatctcggctcactgcaacctctgcctcccgggttctaacaattctcctgcctcagccacccaagtagttgggattacaggtgcccaccaccacatctggctgatttttgtatttttagtagagacagggtttcaccatgtgaactggtcttgtactcctgacctcaggtgatccacctgcctcagcctcccaaagtgctggtattacaggcgtgagccactgagcccagtgctttttttatttttatttttttaagaaatgccataacaggccaggcgctttgtcacccaggctggagtgcaatggcgcaatatcagcttactgcaacctctgcctcccaggttccaatgattcgcctgcctcagcctcccaagtagctgagactacaggcacccgccaccacccccagccaaattttgtayttttagtagagacagggtttcaccatgttggccaggctggtctcgaactcctgacctcaggtgatccacctgtcttggcctcccaaagtgctgggattacaggtgtgagccactgcgtccagccaaaaatgtaactcttaatacacatggactaatttttgctttctttgggatttgtcatttgaatttcaggtttgcatcgccagcttctatatattacggcctttttttttgctggatattatcttgtaaaacgtgaagactacctgtatgctgtgagggaccgtgaaatgtttggatatatgaaattacatccagaggattttcctgaagaaggtatttcaagttaattttagataatctgtgtttactgtattattattttccctggttaatcttatccatgtgtatggctttagataccttctaaattctgttgactcccacatcttagtctatagaccaaaattctcttgaattaatatatccagtttctgactacctccgtgtcctttggacagcaaacaaaactcatatcccctctgccttcccaaacctcctgctcctctgtgtcctgcttcagagaatggcactactgtccacctggacactcaagccagaagcctgagaatcatcaagtctttctctttcacttcccattagtcatcaggtcttatcagttctacttcctaaatatttcttaactttgaactctcctctcccactaccactaccctggttcaggccttgttaatctcttgcttggactgttgcacttgcctcttaactcaccacttgctttggtcttatttccaatgacagcaaatctgatcacatctgtttaaaatagtcatccggctggtcgcagtggctcacgcctgtaatcccagcactttggggggccgagcggggcagatcayctgaggtcaggagtttgagaccagcctggccaacatggygaaaccctgtctctattagaaatacaaaaattagccgggcatgatggcgggtgcctgtaagcccagctacttgggaggctgaggcaggagaatcgcttgaacctgggagkcggaggttgcagtgagctgagatcgcgccattgcactccagcctgggtgtcacagcaagactgtgtctcaaaaaataaaataaaattaaaataaaataaataagycatccattgcctagtggataaaatccagactccttaggatggctcatttactccaggttagctaattgcctgtcctctggtagaaacactttacccacattcttatctaccatatgatatacacatgtgtgtgttcttcatggattgtagcttcgtctttgtttccccagcctcttgtatagagcctacacatagcaggcacttacttatgcataatagtggatatgaaccgtatggaatacttcctcattcctcatcactcatcatttgcctggtgaaatgctttgtcccgaacctgccctatattactttatacatgttgtaccttcttcctgctatgttattcttcctcttgcccctgtttccaccccatccacctagcaaatttctgcttttattatctcagtgaagctttcacccagctacagtcaggcattccctcagggtgctctatctctagtctgctatgaatctattaatagttgtaatataacttttctcacctgtgttttacacacatatacacaacacagatgtgcacmtatatgagtatctgtaggctgggagtttaactactacgacagttttttttggtttccccaggggtttggcacacatagccttattaaatgtgtaaatgaatgagtatagaaaaaatttgaacttgtaaacataaatagattttccccagtctcggcaacatagtgagacctcatctctacagaaaattaaaaaattagctgggtgaggtggcacatgcctatagacccaktgacttgggaggctgaggcaggaggattacttgagcctgggaggacaaggtgccgtgagccgtgatcacaccactgcattccagcctaggtgacagagcgagaccctgtctcaaaaaaaaaaaaaaaaaaaaattcttctgttaatgtaaatgcgtgatataaaacatttaaatttcattacactgaatgatctctaaggtcttatttagctctaaaattttattactctttaatattcccacagccttcagtcacatatatgatatttatggtggatcagaaagatacagtttctttttttgccaaagaagagcwtaaagactagcacaaagccatgaatagtggatgtatcgggaatgcataatacccagaaccgttaaatgttagagctggaagtcatcttggatatattgattactaggagtgaggcccagtggcttgaggagtcttcagtctcagacctctggctctttgcctagacatagttccatgagttccctgtgtctgcaggagtgtgtatagcttcagggctcattctctttctgagctgcagattagtggcagttgtgccaagagcctcatgcacagacagtgggagcccggagagcttgaccacattggctgttggcctctcctagctgacctgtgcccctctgtgtttatttcttccttcacctcttcagtcaggatactcctggcagcaccttgtccctcttggcagtcatttggttgtcatcacagattcctccaaagttattcttcagtcaatgaaagaaaatccttcagtgattaccaagccatagtcaaggacaagaaaataaggaaattcttaggggtttgtcttagtccgtttggcctactataacaaaatgccttaaactgggtaattaaaaaaawttttttaactttgtttttcttaccacctgtataattgcagaatagactgggtaatatataagtaatagaaatttattgcttgcaattctggaggctgggaagtccargatcagggtaccagcacagttggtgtctgctgagggcccactctgcttcatagatgatgccatcttgctgtgtcctcacatggtagaagaggcaaacaaggtcccctaagccgatccccctcatgaggacagagcctttgtgacctaatcacctcccaaagtcctaacctcttaatatcrttatcttgggggttacatttcaatttatgaactttggggggacatgaacattcagaccacagcaggatttcaatcrtaagattagtgagtgttaattttcgtttaggaaatacaatttttaaaacatatttttaaaataaatcttttatgatctttccttttatagataagaaaacatatggtgaaatttttgaaaaattccatccaatacgttgaagtyttcaaaatgcttgctccagtttcactgatacctgctgtttctgaatttgatggaacatgtttcttatgacagttgaagcttatgctaatctgtatgttgacaccttgtaattaaaatacgtaccatgagtactctgactctttattgttgtaagaaaaatagttcatcatcagagaatggtcagtttccattcacccatctgaaagattttaagatgaggttgaattctagtttagagttagcagactacccaaatctggcccactgccaataaagtctcattggaacacagccatgctcatttgtttacatgttgtttatggcgactgccatgctgcaagagcagaattgagtagttgtgatagagacctatggcctgcaaagcctaattaatatgtagccctttcagaaaaggtttgcctgcccctgtcctagtgcaaagtgaatttagagtgagccagattatggaggattctgtgactcttgccaaataattttgacttcatcctgtaggtattaagtcattaaggcgttttaaatcatacagtcaggtttgtatttctgagctgtctataatgaatgatatagaaggtggtttcgaaggaggagactccagacaaggaaaacagaaatcttatgttgccaagttgtctttgctcttaggtgggttatcctggagaaaatggactcaggagctaatactgtctacagtggagcttggtgcaattagaagcaaaagactgtacctaactggaatgaggttactttttatggcttatcaaatgcttgtcctggcccgatgcagtggctcatgcctgtaatcccagcactttgagaggctgaggcagggcagattgcatgagcccaggagttcgagaccaacttgggcaacatggtgaaacactgtctctacataaaatacaaaaattagctgggcgtggtggcacgttcctgcaatcccagctactcataaggctgaggtgggaggatctattgagccctggaattcgaggatgcaattaattgtggttgtgtcacagttcactgcagcctgggtgacactccagcctgggtgacaaaggagaccccgtcaaaaaaaaaagtacttgtcccaaaagtttttgtttcctagcttagaatttataatcagattaggtttkggagataaagtatatgtggtatttttttttttttttttgagacagtcttgctctgtcatcaggctggagtgcagtggcgcaatttcggctcactgcaacctccacctcctgggttcaagcaattctcctgcctcagcctcccgagtagctgggactacaggtgcatgccacgacgcccagctgatttttgtgtttttagtagagacggggtttcaccatgttggccaagatggtctcaatctcttgaccttgtgatccacctgccttggccttccaaagtgttggaattacaggcgtgagccaccgcgcctggtctatatgtgatttcaaattaggtggccttataaatataagcagatggtttctgggcaaaatcaaatgatttctgtctctattttcttgagtaccaattgtaaaaactgaaattaggttgaggaaagtgctttagaaataataaagatgtacaaatacmaggctttggattttttattagttctgcaataaataataggtttatagttcacctgttgttgatctcatcagtggtcgccaagtaagagggtgaatcactcatcccmagagactctgctacctcttagctctggagggtaaaaagcaagggccagagcaaatacattggggagagggggagaaaaaaaaaatcaggctattttaatagccctcacatgccaagtgcttttgattcatcatgtttagttttcataagcttgtgaggtagataatattatccccattttatagatgagggaatttaggctccaatgggttaaataacttgtacaagtacacatactgaatgactgccatgaggagggatgtgaattttggtcacgtgccaacacctacactcttcctaccataccacactggacaggtaattgtctagtccctcctgaaccactggtcacctccccaagctgttaagaggagcgaggggagcagtgaatagcaacagacattctaaaggtgagccagtgactggaatccaggaattggtgctcaggaggtagagaagcatcccggagaactgagccgccttcacttctggctgcaggtctaggcctttctgctctcatcattggctagtgaactgctccgccgacctcatcaaagagtctgtcttctatcatgtgaagggatctgtggagtgaagaaatttttaaaaggccaagtcagtatcaattcaaacaaccaagatactgtcacatgcccattgaagcaggaagaacaatgctgatgttgctgttggaaaactggcagtgcctcagcactgtaaggagaatcctaggttgtcagagctggaataactcatttgatttctctgctatattttactaacagggaaacagatacagaaaggtaagataagttgtctagggccgggcgtggtggctcacgcctgtaatcccagcactttgggaggccaaggtgggtggatcatttgaggtcaggagttcgagatcagcctggccaacatggtgaaaccctgtctctactaaaagtacaaaaattagccaggcatggtggcgtgagcctgtaatcccagctactcgggaggctgaggcaggagacttgcttgaatctgggaggcagaggttgtagtgagccaaggtggcgccactgcactccagcctgggtgacaagagcaagactccatctcaaaaaaaaaaaaaaggttgggtgcggtggctcacgcctgtaatcccagcactttgggaagccgagcggggaggatcacaaggtcaggagattgagaccatcttggccaacatggtgaaaccccatctctactaaaaatacaaaaaattagctgggtgtagtggcrtgcacctgtagtcccaactactcgggtggctgaggcaggagaattgcttgaatcgggaggtggaggttgcagtgagctgagatcgcgccactgcactccagcctggcaatagggtgagactccatctcaaaaaaaaagttgtctaggataatacagaagtcaatggaagagccagaacaagagcccagatttttaactgttgctataccatattgcctctgaatgaaaatcaggttagggtgtgttgaaacgttatggcgtagagttgctgctctggcctttgaagcaactgagtgagtcagagtgtggtttctacccactctgccatgcccagttcccactttgagcccactctgcaaaagtctaaggctctaaggaayaccactgtagaggaaaagaattagactaattaggccagggttcacatcttggctgttatttactgagtaaacttggactcattttacttctcaggcctccagttttctcatctgcaaaagggaatgataggctgggcgcggtggctcatgcctgtaatcccagcacttcgggaggccgaggcaggtggatcacgaggtcaggagttcaagaccagcctggccaacatggtgaaacccggtctctactaaagattttaaaaaaattagctgggtgtggtggcacacgcctgtaatcccagctactttggaagctgaggaaaatctcttgaacctgggaggtggaggtggcagtgagctgagattgcacattgcactccaacctgggggacagggtgagactccgtctcaaaatttaaaaaggtggggggggatgataattccattagataatggatatgcaaagtgatcttaaaactattcaaatgccagttgttagttttacaaccactgttattattcagtgaagaagctgaaacccagagaaatgaattagcttgcccaaggccccacagctcattagtgatagaatcagaacgtgaacccagagctgttgacacagccccrtctaattcaagaagaacctctgtgaggcaactcagggagcctcaacgggagagggaagaagggttgaggttgacagtttgggtttgaagcgggagaaggaaaaatggctgagaaaatgcctggagcagagctctccataggctctgtgtttgggggtcccatgtttattccgcataattacagagcagccttcacacagattatgaagataacacaaaatggcagacagtgggtacgatggaaagaacactcagctcaaagttgaggccagtcttacttttgtctccttactgtgtgactttgggtgagtcacttcacctctctggcttcaatttccatactagtaaactggggatgagaatcttttcctacatagctgcatcaggtggttttgagattgcaatggacgtggatgttgtttacaastaatgagaccagtttgtgggagcagggctggcaggtggcacagaatcaaaactggcaggtgctgtggtccaatttctattaatactagtctttatccatgagtgaactagtggtgaccatgctagggccccttcccacctcctaccctctgccaccacctgcttgtctagcttgctgctcatccacactcaccaccccagcccctctgtgcatagacatgtaggcttagactggaacacatattcatatgtacatacaacagggcttcccaacaggcatgtctgcatactccagtttgcctggaatggattagagtgccatgactggtccctcggcttcccgtttggtgggttccaacctgggatggtcagagtacccccagcctgttgtagcagtactgcaagcagcctcacctatgtatccccatgtgccatataataattttccatgttctgtgacttgaaaaaatgttgggaaacactgtcacacaaatggaattcacaatgttcacttaaatcaatgtgcatgccttaggtaagtttttttttttttttttgagatggagtctccctctgtcacctaggctggagtgcagtggcacaatctcagctcactgcaacctctgcctcccaggttcatgccattctcctgcctcagcctcccgagtagctgggactacaggcacccaccaccacgcccagctaattttttgtatttttagtagagattgggtttcaccatgttagccaggatggtctcaatctcctggcctcatgatccgcccgcctcggcctcccaaagtgctttggtgtgagccaccgcgcctggcccctcttcaattaaattcttaacaaagtcactgatgagaacacactcattcaattcacacatttacaagcattcacatactaataaatgcacacgtgcacaaacacatatatgtgcatatgagatatgccctcacaggccacttttccctctgtttccatatcacttcattgcaattgccaatttgaggtcagaaggatagtaacacaggcctagtcttaggccctcctaggttgtggtcccaataccctgacccaagagtggctctgtctgaaagtcaggctgttcctctcccagtgggttgcaccactgccccctctcctctcctggaatgtccctttgtagactcacacccaccagcatggccaccattaccttccctagtgtccaaggtctaccaaacttgtcccgtcatttcctggtatttccttgtcacctcctgggctttctcggtgaggtgcatgaggatgtgatggaggctggagaagtgcaggtggaactgggcttccaggtccagctctcctgaggcactctcgtcctcgacttcctctgtctctgcggttccattctcttcgctgcctgccaccttggcctgccactcctcccgyggcagcagcccatggtccacatccacacagatggccttgagcatggtgaagtaggtgtagagatcaggggcctcagcctgggcctggcccccaggcccactcagctgcacgtcccgcagaaggctggggatcatcaccacctgctccatgttgtgcacctcggctgcataccggtccatgacggtcagcaggcagttcttggggtaacgcttggttagcacctgcatggttgcttcctctgacacaatgagaccagcagactgcccccgcactatttctaggctctcgrcagattgacaggatgccaatgcccagctgttgggtcaacacagccctgttttgggccaatcccagggctcaggccccagcatctgtatcaggtgatccatctgcccagagacagatctgccagccttctrcttgtcatcccagctctgcatgactgccccagcaagaacccgactcttcctctgtcagcttgctgagccagttggaaggaagcttttccctttggcaactggtatactggacttcagggcaataaataattctttcaggtcactggagaccaagctgtctctttgctgcctgcttagggcagccctccaaagcacagttcactccttcaacctggggtgactccattgtgaaatggagaggatttgaagtgaaacagcttgatgtggggcaaggaacactgaggttggagtcagaagcccagtactgcaatttcctagctgagtttttttttgtttgttttttgctggctaacatttattgagcacctactgcacatcagggtctgctgagctttttcgtgagtgatctcatttaatcttcaccacaacccttgtaaatgttttatttatttaatttttgtagagatggtcttgctatgttgcccagtctggttttgaacttctggactcaagcaatcctcccacctcagcctcccaaagtgctggaattgcaggtgtgaaccaccagtattcctgttttgccagtgaggaaatttaggtgcagacagctaaagtaacttgctcaaggtcccactggggctgggattccagcccaggaccacctctacccacctccaggcagtgctgtggactgacatgaggttacatagtcatacaagttaaccagatccatatcctctgtaaatttgaggtggtgtgaggattgaataagacaaactaataaaaatgctttgtatcagtccagacaagcggctgggatcaaaagaggaaaaaaaatgctttgtaaaccacaaagcccaatcctcagatgtattatctatgcagattctagattattgctaaggcttctcccaaatctaaccagtcattccataagctacaatgcttccactttattactgacctttccttggaccagcagtcttggaagataataatcttttgcgtggtcatattgtcatagtttacaaactgcatttgctatatattttttattagatatttaagaaaatggccgggcgcagtggctcacgcctgtaatcccagcactttgggaagcccaggcgggtggatcacgaggtcaggagatcgagaccatcttggctaacgtggtgaaaccctgtctctactaaaaatacaaaaaataagccgggcgtggtggtgggcgcctgcagtcccggctactcgggaggctgaggcagtagaatggcgtgaactcagaaggtggagcttgcagtgagccgagatgatgctgcgccactgcactccagcctgggcaacatagcgagactccgcctcaaaaaaaaaaaaagaaaaagaaaagaaaagaaaatgaaggcctggggaaaggcccaaagttgcacaacaagttagtggcagagtcaagtggagaataagacattctgaattctggctcaggtacctgcctcctccactgcctctggtgaaatctgctgaatgatgatacctcccacgcctgcaggagaggagagaggaggagggagcacagggaggggacgtggggctgaacagggcctctgtgttgtctcacctaagccaccctcacctccaccctagggcaggagcccactctgcaccctcccaactgacaatcattcactcctctgctccctcccactacagccagagctatgaaaaagcttatctttagactgaacaaaattccgcctcccagcccggcatggtggctcatgcctgtaatcccagtactttggaaggctgaggcaggaggatcatttgaacccagtagtttgagaccagcatgggcaacatatgagaccctatctctacaaaaaattaa

SEQ ID NO: 93488 - DNA, 35405 bp, Homo sapiens
cccagtcagtgactcggccagcagtggagaagtcagagagaacagggggctgtaaaggctatgggttctctaactcattactggcagggactgccatccagggctgaccagcacttcaaacgtgaggcctgttgtcctaaagaccagggccaggtgaagaacatccttttaatataaattgcacttaaattcagtgcttctcaatttatgttaattgcaaatcgaagtcttgcaatttcacatgtgtatacatatacctatatttaattttttaaacagcatagtatacaggatgttctaagacaggagttttcaaatgtagatgatagaaaaataattttttagggagcatttggcaagcgttatcaaaactttaaaatatttatactctttgtcttaggaattccatttctagaaatacagcctaggaaaataatcagagatagagacaataatgtttgttacagcattaaattagatctaatcttaatatcccaccattaagacaatggtagagtgtagtatatccatttggtaaattattatgaatcattcaaaaatgatgtaaagaattctaatgaaataagaaaatgcttatgatataatgtcaaacaaaaaagtagggtatacaactgcatgtacatatgtttcaaccattaaatctatatgtttatttctctttctccacataatcttagaaagaagggtaagaaaaaaaccatgggaagtgtatatagtgttttccctctcaaaggaggtgatttgggtgatttttaaacaccttcctcaatttttcatactgtgagtgtgtgtgtttaggattgcacacacatagcagaggttttatctgggctggagctgagatttgggtatctctgatgggtggaggtgacaacctctctctctcagatatgtttacctccattgatctctaggggccggcagactgtccttgactggtgctatgatttgaatgtgtgccccagatttcatgtgttgaaaacttaatccccaaattcatatgttgattaggagtgggagctttgggaggtaattaggattagataagggcatcagagtgaagctgctgggatgggactggaggctttataagaaaaggaatggagacctgagctggcatgctcttgccctcttgccatgtgataacttcagccttgttatgacaaagcatgaaggtccctacaagatgctggtgccgtgtacttggacttcccagcctccagaaccatgagctaaatgaacttcttttttagaaaaataaatcacccagtctgtggtattctgttatagcaatagcaacagaaaacagactaagacaacgggaacacaggcatttatggatgtgcttagcaagcctgggttggggccccagctccttctatccatgtaaatggcaaggggcccaggacaaagggagcagagcaaacaatgctcagaaagggggcctgggagtcagaggagggcttgttctgagaaacaacataatggctgctgcttgaaagtcctcccttgctacctgttgacccaatcgccatggcaacttgtgtttactctgggaagagttgctattgtcaaaaagagagctataactcccaagggcccaagcaacccttggggagcccatctaggtgtatgaagttagtggtgagggagcgtgtctgcagccactctgcagtggcgattatggagcaagaacaggggagcatcccgggggatctgcgcctggggcagtggagaagtgggcagcagacttggctcagtggcaacagcagaaagtgtgggaagaacagggtgttgtgctggagaccaggatcccagtggaaattgagactgagagaggaagacagagggagggaactaggggaaacagtcttggggcttgatgctgtgacttcatatgtgtcatttgggttacaaatatgaatatgggatagtagggggatggttcagctgcctcaacctgtctttgtaacagtcatggcattctgcatagtgaaaagatcagaatggagcaggagtttataagctcaaattcatcttgcagacatgtttcacgaaggtcaaaaattgggtacctttaggcaggtcctaccttctaattgccatgcaccccaccccttcctactgtctcacacctggcccagttcacttattgctatcacttgcctaagccctggaggtatgtgagtttgcagcctgtgggtggatgtcctccaagggcctttccagctctcatgttacaaagtggctttgcagccctcgtctcacttgccgtcctccatcccaccccctcatatccagagctcccctaagaaccactcccccttctccatgcacatctgcctcatgcctgccttgcttaggctgccctacctgcctgcaagcccttccactctggagacctccaacttgtcttccaagtctccattcagggttctccagcttcatgatgtcttttccttgtcccctctgatgcagtctgagcactcctgtctttgtgtcctcactttggccagacactgtgatggcttttgtccttgtctcccttggctgctagccttggagcagcatggggcctacgctctgctcatctcccagtttttggtgcctagcatggtgctataggagggaaggtattacatctccgtacactgctgagtaatcaggcactggctcagagaggttcaccatgttgtccagggtcacacagctaatgagataagcagagttagtaccagaattcaggtcttcttccttgaagtgtccactgggctttctctgcaccaggtatcacaacttgcagggaaaacccaggatgctttaatcatttgaaatgaaccaggcaatagattagtgatgagaaataatggatatggctgatctatctgtctgtctatctaacatatatatgagatatatgtcaatatatatactccacagagatgaccgagtgggtgctattcagaaaacacatcggagttagtcctttccccagaaagttgacctccactcttgggcatcctcttctggatcgaggaaggtcctgttgggtaaggactcccaaagcatcagctgagtacactggcattgttccatgtcagggtgtggatggaaaaatgcctgtttagtcatgtgggctctgcagccacagttcaaatcccagctctgcaacttatgagctgtgtgaccctggataaatgagctaacccttctgtgccgcagtttccttatttataacgaactcatggtgatagtttctagcctcttgaggcattgagaggattgatgctgtgacctcatatgtatcatttgggttacaaatatgaatatgggatggcaggggggtggtccmtctggcctcaacctgtctttgtaacagtcgtgacattctgcatatatatactcccatatacatgagaggattaaatgagttaacccgtgtaaagcacacagtgagccctaatgtgagtgcctctgccattaatattgtcagtttgtctgtgagtgggcaagagggcctggcactagaaatcaggggacgtggccctggtctggctctgcctttggctatccttccccaactctcctgcagggggcaggatgggtgggttccatgttcttggggatttttgcaattcctttgcccctgcagcactcttctctgtggcttctgcaactgctttgggacgaagcctcttgagtagatgaaagggagtgggaagttgagagcatccccgctccctgccacctcctgcgtcttcttaatgagctgccactatctctgtggggtgtggggtcgtgctagctcccatctggagggaggctggctctgaccttgctctccaggtgccagctcacctccagggaggtagtttcccgaatgctgaccccaggccaggccctgtcctccagggactcaaagtcactttacacttcagggcagcgagtgcagtgcaggccaagcacaggggactgggtgatcccagccaggaggggaggggctcaaggagagggtcgggaggaggtgacccgggaatactgaaggtccagtaggaggtgattagagggttaagggtgagcattccaggaagacaatggcctgggctgaggccacagaggaacaagctagccatgttcagttgttcagcgggctagggtggaaaatggccagattccaacctcctagcctgggaggatcacttctgggagggagaacctaggccccggccaggattcctgtggtcagtttgggctgaggaaggtgggatgctgagcccattgcttctctggttttaagcccttttcagtgtatcttggaaaagaaaacacacctcttcttctgtgcctcttcttcctgggggcagggggtaggcttaaaagtggcattaaacaccttattcccaaagccctgggatgtcaatgatggggttccctgatgagctcctgggtgttgctcaccttcatgccagcctcccggccttcctgcattatgaaggaagctccagaagcccagctttggccagctgcaaagccagtgggggcccagtgctgggaggccatatggggagctgggcagaggggtaccttggccgacctagggacttcaagctggtccctgagctaagcaattgcgcggcggtgctcagggcaggcctgcctttctgggtcttcagacttcccaccatctgcttagtgaggccctctgtttaaattctctacttgtctcggcttccacaaaataattagcatctattcgttcctagagcttgcttggcgacattagtcattgtaggagctttcagtgcggcttgcagaaatttccatttgatgcaaagttgaaaatggcttaagtgggactccacgggccccacttactttaccagcatctggtgccttggtttgtttcctcctacctgcttctttgctgccttctgagcaggtgtggggcctgatgatgacaaagggagaggagggcactcagacaagagaggatgctgtcctcctgggacaccgtggggaaggagactcacaaggaaaacccatctggggtgggagagggaggaggaggtttttagtgctgcagccacctaggcccttcccgcagggacagagcttttgtaagggagcgatttatgtgttgagctgcaaaggaggccacataaacccaatcccggttcaggcatgaaatccgctgcagaacaattctctgacatatttgcttacaaaactaacatgcacgattgcagaacaacctgctctctgaggcatgagtggctcaaagccctttggcttttcttgaaagcagtgctttggctctcatgagaacccagctgctctagcgttggtcagtttacatattcctgagccagagaacgggagaaggtgctgcctcctggcggtcctgtggggaatgaatgtggggcaagccagttcctgaaatcatgcttcacactccctgggctgcaaaatgctttccttccatcaaccctctcaggtggatgttaaggtcttatctgagccaatggggagatggacattcagggagaggaagggccatgctttgtgattctggcctttctttgcctatctgtaaaatgatctggttgtctgtaatcccagcactttgggaggccgagacgggcagatcacctgaggtcaggagttcgagaccagcctggccaacatggtgaaaccttgtctctactaaaaaatacaaaaattagcaaggcttggtggtgggcacctgtggttccagctactagggaagctgaggcaggaggattgcttcaatccaggaggcagaggttgcagtgagctgagatcgtgctactgtactccagcctgggcaacagagtgagaccctgtctcaaaaaaaaaaaaaaaaaaaaaaaggacctggttggacaaagcaatctctgagggctgtccacatttagtctctcccttgtggtgtgcattgggcctgaggggttttacccctatggcggtccacagggggaccctgccctggtcagtggcccatgcagcaagacgcatggtgctgtgcgacgctttgggtctgcagtgtaagacagatctgggtccaagccctggcctggccctgttttagctgtccggtctatggcaagttggcttccctggctggatcttggttttcttctcatccacaaagtggggtcagctccctcttctgcctgccttatgcctcactccagtgtgagtgtcaaagaagagaatcaatatggaaatgccttgtggatgaaaaggtggtgtttgattttcttttgcaaaacatgatatatgcaaattataccagaaatcaaatctcacaaaaagatgatgaaagataagcttcccttcctacctgtctcccacttcttctctctagatacaacctattattactccttgtgtgcgcttccttagagactttccatatgtccaatatatatgtgcaaagagtgacatctcaagtatttatacatccatctatctatctcacttagatgatttttaggacttttagaaatatccgttcagcaaatatccactttccttctcttcctcccaggaaaatgctccctggccccattggtattggacttggccatgacttactctggctaatgggatatgaaccagtgtgacatgaacaaagatttgaaatatagttggtagaaatctcctctagtgcttctgccatgaccatgagaggaataagccctagctagctggctgatcccagaagaatgagagctgtggattggagccactccagcctatctgtgggagtgtagaagaaaaagaaaactgtcccaactgactgcacacctttgagcctgaaaataatgcttattgttgtatgtcattgagttttggggatgtttgtcatgtagcaattgctaactgatacaatatatatgtttactttttttctaaactgtatgggaacatatatacaatattgtgcaccttgctttcttcacataatgtgtattggaaattgctctgtattggtacatgtacatgtctctcaattttaatggctgtataatattccatcttatagtatgttccttattgatggatgggtaggttgcttctgtcttttcctattataggttgaatatcccttatctgatgcttaggaccagaaatgttttggagttcagatttttttggattttggaatgtttgcattatgtacttactagttgagcatccctaatccagaaatctgaaatctgaaatatttcaatgagcatttacctttgagtgtcatgttggtactcaaaaagttttgaattttgaagcattaaatgatgattttggatttgggatgctcaacttgtacaacaatattgtaatgactcataattatattgcaggacaagtacctggaaggagaaattaccaggtcaaagagtatgttcaaaactgttgaaccaatttacactctcaccatccgtatatgacaactgttgtttccccacaatagggatattactttgaggatgcctctttactgcagcagaagttctgattcttgttctacagccccacagtcttcaaacctcaccatgaggtttcaaaaagcagtgttttcccagagtggtatgtgattttaggtggtaccagagacgatttttaaaaggtacacagaaaagatactaatgaacaatgaatcacgcagtgataaaatgattcactttccaaatctctactgctcctctgattccatcagggagaaagtcccagctggatgctgatgtattttaacacttctctagcagttgctaattttcccttgaactcagagccttcggtgggcagtagtacttagctttcactggattcattaaaaaaaattaatttgtttttaatggacaaataaaaactaaatatatttatcatgtacaatgtgatgttttgaaatgtatatgtggtggaatgactaaattgagttatttaacatacgcattacttcacatccttaccatttttttatggtaagaacacttaaaatctactgtcttagcataattttcaagaatacaatacatacttatggtcactatgttgtacaatagacctcttgaactcattcctcgtatttaactaacatgttgtatcctttgaccaatcctcatttcctggtaatcactgtattcattttttaccagttaattttatttactggctaatgttcctgatttttctttgttggagagtgattgcaaatttcctttgaaaataaatttatttcattacaaaaagcttgtgctcagatttatttacttttttttttggaagtaatgttagacatacagaagggtggcaaaaatggtacagggcttcctatattcccttcactctgcttccaccagtgctaacaccttacataaccgcaggacaattatggaaaccagaaaattaacatcgatttgatactcttgactaatctacagaccttatttgaattttgccagttttcccactagtgtcctttttcttgtccagatctaatccaagatcccacattgcctttactagttgatatggtttgattgatakgtctacactcaaatctcatgtcgaattgcaatccccagtgtttgaggtgggcctagtgggaggtaattggatcayggggtggatttccccctttggtgctgttcttgtgatagagttctcatgagatctggttgtttaaaactgtgcagcacctcctcctcctctctgttcctcctcctctggccatgtgaagatgtgcctgtttccccttcaccttctactatattgtaagtttcttgagaccccccagccatgcttcctgtacagcctgcagaaccatgagccaattaacctcttttctttataaatcacccagtctcagatatttctttgtaacagtgtgagagtggactaatacagtagtcccagctatttaatttcccccacattgtgacagttcttatgtctttatctttcatgatcttgataagtttgaagagaactggccagttattttgtagatcatcacttaacttgggtttgtctggtattttctcatgcataccacagaagtgatgttttgccattctcaatacatcttaggaagaggtacatgatgtcatatggcttaggtgacccatgcttggcagaggtttgggaaaaccttgcataggtggagacagtttgtggttgtcctctggtaacttctgtgatgtggatctgtgtctgggcaatagtcctcccgatcctggcctgccatgaggaggccgaccaccctctgcccttgtcaaaactcatggtgcagctctgaagtgtctatgatggaaaccagcaaccccatccccagcaccctgcttcctaacgttggtcctgaatggtgactgagctaagactctattgagctttcatttctgtgccttctgagacatgttcatgctggttcagatgaaaggtgcgagacagctctttggatttgatcttccctcagatgaaacattttaggctagaaaataaagacgtcccaggcaggtgggagtcagtgacacccttgatagaggcatctctgcagtttttcctttcaaccccaaaagagattttcccaactgatattgctcaccatctgttgccaagctattgctttgtttgactttctttcccttcatgttttggaaaatgttctgtgaaatcccaatctctcttccctctgtgatctgaagaaactctctctttcggcttcttccccacctacctctggaaagacactggagtcttggagcggctgctggctcctgggcagctggtgctagtttaggtctcagataatattgccctgaggagaaaagccaattaccttaagctaagactaattaactaccacagagggtgggatttctgaagaaaatgcctgactctccctacggtctgtttaatgagcggatggctccgcagggatgcctttgataatcccagggcctgaaacggatcccaccacacaactcacaactgaatctggatcccagcgtcacctctgcctaatttctgactcacatactgactggtttcatgtactgtcgaagttgatggatggaggtgagaaataatttttttatgttacttgtcaatatgagtcaattcctcctttttcctcttctgtgtgcaaagtcctggtttgggtaccaaaaagacatgggagacactatatcttaggcactgttattgctgctggggagacagcagtgaatgggctatagacacattgcttgtcctcttggagcttggaatttagtgggaatcccaggtagcttaactatgaagagggatgaaatttaggataaagtgctatgggagggaagaagaggagacttaatccagtttggggttgtggagccaatttcaaggtgaggcttgaacaatgggcaggaattatgcagctagaggagccagaggtgggtgggaagggaaggtgtgtttcaggcagaggygccaaatgtggcacagagatgagaatagcacagtgaagttgaggaactgttgaagtcgaattggaacccagagttcaaagagaagagtggagacagatgagcaggaggagggttggcaggaaaggccttgtaagctcaagggtttgactctacttctaagagccaactattgtatatgagagggagggctcacatctccattttagttgacttggctgctttgttatagtccctttgcattgctataaaggaatacctgagaatgggtaatttataaagaaatggtgaagccccactaaaaatacaaaaaattagccagatggggtggtgggcacctgtaatcccagctactcgggaggctgaggcaggagaatcgcttgaacccaggagtcaaagtttgctgtgagctgagatcatgccattgcacttcagcctgggcaacaagagcaaaactccgtcttaaagaaaattataaagagaagaggtttattcggctcacaggtctgcaggttgtacactcatagtgctgggaaatgctcctggtgagggcctcaggaagtttacagtcatggtggaaggcgaaggggagccagtgtgttacatggtgatagagggagcaagagagagggaggaggtgttgggctcttttcaacaaccagatctaatgtgaattcatagagagagaagtcactcataactgcaagaacagcacaaaaccattcatgagggatctgcccccatgatccgaacacccactatgcccacctccaacacttgaggtcacatttcaacatgagatgtggagaggacacaacattccaatgatatcagctgctttagaaaagagaaggctggagacggggcagggagaacaatgggcagatattgtgcagttctagaaagaggggatagtgtcctggtctagggcaggatagagaggaagaagtggatggagagtagggtttttagtaacacttcccaccccaggagtaacagcatgttaaatacaatgggtctgagtcctaataggtgctacctttctttaccaacagaaagtgacatttctctgtggcaaagtcaatgttattgttcatcacacattgagttctaaccagaggaataygggcagaactgatgtaagtcttttccaggattgagctaaaaacattccactcaaccctccaggcttcctgaatggtggttttctaagacagctggagcttgaatccctgmatccctacttggaggagcgaccccaggacaatrtcttatcttgtttcaagtcgtgataggaacaagaaaccaccgtgtgttagttaaatcactgaaattttgaggttggtaattatagaaactggcatttcttaccaggcctaccacaaaccagttgggctcatatttttcttagttctttcacggcattttggtggtttctaactctctgttcatccagagaagaggaattgttcagtgtggagaaggaaggaaaggcagtcatacagaaacagagatatatctacacacggatacatggggcccctcaaccaagatacccatacaggcccagaaaatcactcagtaataatgataaaacaataaaacygaaattccttgaatgtcatggtctgtgctaatagttaattaaatcccacaacaaccctacgaagtagatactattatcattctctctctctctttttaatttttgagacaggaccttgctctgttgctcaggctgtagtgcagtggtgcaatcacagctcacygcagccttgatctcctgggatcaagtgatcctcccacctccrcctcctaagtagctgggactattgatgcatgccatcatgcctggctattttttaaattttatttttgtagagatgacgcctctctatgttgccagggcttgcttctctctctctctctctctctctctctctctctctctctctctcttaacagatgggaaaactgagttcaagaggggatgagtaactttcccaaggccacataggatttagacccaggcatcccgactcaggagtctgtccttttagccacaactcacagacaagggcacggtgacagaggtctggggatggacacacatayacacaaacacacacacacgacagagacagagagtatctggattgtccttgtcctcagcatgaacaccattccgctttcaggagagagatggccagattgcagtggtgacaagaacagagcattgccgttactgaagacttactttaatgaaattctcagctggctcaggacattttgtttctctctagataacttcctgatgctatcacttttgcataccctgtttatttcacctgctccgtctctccctggcccaaaagggaggctctgttggtttgtttgatgttccttagatacaaatgatccttccctgaataacaaataggatgcacccttcagagggatttatgattcacctcttgttcctctagtttctaaatgagatacttccccagaaggtgctttttcccagttaacacctgaaactttgtcccagcagatgggttgtctgctgagcacacgggcttagtttttcagatcctgggcttgatgtgtcacccagactctggcctctgaarccttaggctgcccagagtggagaagtygtcagcaatgagaacccctgcctyggcatatttgtrggtgtgrggagtagttcctgtgggaagttcctgggataacagtttctaggttgggctggtctcttcatccatcagttctagtcgctattgctgcaaaactgaggggtgtcatgcagccatttttattacatttacagattctgtaggttaggratttggacaggacccagtggggatggtgtgtctctgccccatagtgtctggggcctctgctggaaagatttgaaggcaggtgttggcggcggggggagtcacttgatagctttgggctggagtcatctggagatgtcttcacttatatctggaggttgatatgatatataacatctgaagctgaccatcagacagagccagatggacggagcgcctctacttggcttccccatgtgatcgctctgcgtgcgctagtttgggatggtatacagcatrgccatggggttttaagaggaagcatcccagccgggggcggtgggtcacacctggaatcccagcactttgggaggctgaggtgggtggatcacctgaggtcaggagctggagaccagcttggccaacgttgtgaaactccgtctctactaaaaatacaaaacktagccgggcatgatggcactcgcctgtaatcccagctacttgggaggctgaggcaggagaatcacttgagcccaggaggtggaggttgcagtgagccgagatggcgccgttgtactccagcctgggcaacaagagcgaaacttcgtctcaaaaaacaaaacaaaacaaaaaaaattgcgacatagcactggaggttacataatgttacttctgccatgctgttttggctgagacagccacaaagtatttctaggtttaagggaagaggatactgatctcaccactcaatggggaagtggcaaggttagaagaggacgtgggaaaagcctctttgcagccaccttggagaatgtaactgatataccatttcacatgtgaatcccttccttgtagcccactgcatgcccttgcagcttccgctctcctatactcctatcatggggagttcactacttgttccagttaattttctttgagtgtaagcaacagaagcccactctggctaacttaagcaamgcaggatgtactgacacaaggtggggggtgttgaaggatggaagggaaggctgaagatccaggcttggcatgaaaaacgaccagggcagtgcaagaagaagtcttgttcagtcacgcctgggggataaattccaaaccatatttgaaacttttagtcattctgttcaaaatttaaatcamgaggcgagaagatctgaatggccctgtgctacgaactttaccacttaytacttacttgactctgggaaggttgtttcactgctttgtgactcagtttcctcatctgtaaaatggggacactcatagcagctacttcatagtttatgtgagacttaaataagatggtggttacaaagtggttagcccaaagtctagcacatggtaaatcttcaattaatattagctaacaactgcaacaataacaacaactgctactgttactgcaatgactatttttactattattattattatttttgagatggtgtctcactctgttgcccaggctggagtgcagtggcataatcttggctcactgcaacctcygtctcctgggttcaagcaattctcctgcctcggcctcctgagtagctgggactacaggtgcatgccactatgcctggctaattttgtatttttagtggagaaggagtttcaccatgttggtcaggctagtctcgaactcctgacttcaggtgatccacccgtctcggcctcccaaagggatgggattacaggcatgagccactgtgcccaagccagactattactattttggttggcttgcttctgtgcgtagtacagggtcaggcacacagtaggtgcttagttttagtgctgaatgcatgaacaaataaatgaatggcttctgctctaatacatagcaatcaagttctttgaagtcatctttagacatttctttcttttttttttttttttttgagatggagttgcccaggctgcagtgcagtggtgtgatctcggctcaccacaaccaccgcctcccggatycaagtgattctcctgcctcagcctcctgagtagctgagattatgggcatgtgycaccatgcccgactaattgttttgtatttttagtagagacggggtttctccatgttggtcaggctggtcttgaacttccaacctcagatgacccacccgccttggccccccaaagtgctgggattacaggtgtgagccaccgcacccggcctagacatttcttataattagatcaaaacaagaaaaatcaacatataagaatctcagtgcatttaaatattagacccaccctcctgagtgactgttttctctttctcttccttccttccttccttctttccttctttctttctttctttctttctttctttctctttcttctttcttccttccttccttccttccttccttccttccttccttccttccttccttccttctttcctccttccttccttccttccttcctttttgaaagagttttgctcttgttgcacaggctggagtccaatggtttgatctcagctcactgcaacctctgcctcctgggttcaagcgattctcctscctcagcctctggagcagctgtgattacaggcgcccgccaccatgcccggctaattttgtacttttggtaaagtacaaaatgttggccaggctggtctcgaactcctaacctcatgtgatccacccacctcrgcctcccaaagtgctgggattacaggtgtgagccaccgcacctggcccttggtgattgtgttctgtgtctgtagtccttcttctgaaaaataatccctggtgttgctctttgcycgagtccttcagaaatgctgcaaacagtaaacaagcaactccactccaaggaggtgaatcatctgctgacgggattgcattccacatcaattctcgtgtcatatttgattaattttgtatctagcttcattacatctcatccctcatttcaaaggtgtccttcataggggacactggaggaagcagagaggggagaccgggcaatggacatcctgctgcgaagagttcatggatgccccaaacagtagcaactgagatttaaccctctcagagtcccacctctgcccatgagatgagctctctgctgttactgcagcgtttcccaagcttgagtcacggtgacccagccaccatgagacagccactttacayaccattaatcagcagaatggctggcaaatgctaacycacttagcagtgatatcctagcaggtgacagctaccggagctgacagcatctggcyggagggcacacatctccaggcaggccgtctggagctctctgagttctatgtgggttactgtgaagctgaaggtgagacttccagcttcctggccaagagttgcttaaatgggtcagggcaggatttaactctggcacatctgagttctgggcccttattcaccagggctgatgacatctccttcccattcttccccttctacccacgtcctaccacatcttggaactctgaggattcatctaacatttattgaattcaattcaataatttgttgagtggtgtagcggaaacctctgctgtttacgttatgtctgtccttttggcccacttctaatttcaggtgaagctgtgtgcatgtgtgacygtagctgtggctatgcatggaggctgagcctggatcctgccctcagaccatgctgtagtcatggtcacagactgagccctcattttggtcacaggctgagctctgatcatggtcacggactgagccttcctcctggtcacagagagagccttgattctggtcatagactgagctctacagactaagctctgatcataagagaacacagtgagaaagagattgaggatggctcagttcaggccaccctcacttctgcagtcgcaggygggagccgtgccctctcagtgggatatgaggagtgggggaatcagastaaaggcatcctgcatctgaacaaagacagtgccaattatggcagcttgcattctcaggttcttaacttggaaaaagccgctgtggtttcaggcacagcctaatgaggttttcagagctgtgtcttatttcctttagtgcatagaggttattgtgttttgcaggaaaattaactagcaattaaatttctgaaaaagtgtttgaaactcctacaagcagtgcctcattgttttgcaagattgggtacacaatgtaataattccatctgcaaattaattttctctcactcacggcttctgatgtaactgcaatgtcatccatttagtcattcattcatcctttgattcagtgcacatttactacgtacctcatgttgaacctggcactgtggggagggcagaggtgggtctctgcttcccaggcagctccctgtctagaaggaagacaagattttctcagaaataatggtcagaggaggcagactatgatcattccattagaaggagatttatagtgatttggacttccagatttaggaggagggggaggtaactcctgactttgtctcagtgaagaaagaatagaaagaaagctgaaagtagccaggcgcagtggctcacgcctgtaatcccagcactttgggaggccgaggcaggtggatcatgaggtcaagagatcgagaccatcctggccaacagggtgaaacctggtctctactaaaaacacaaaaattagctgggcatggtggcacgcgcctgtagtcccagctacttgggaggctgaggcaggagaattgtttgaacctgggaggcagagactgcagtgagctgagatcgcaccactgcactccagcctgatgacagagagagacagaggaaaaaaaaaaagaaagctgaaagttgtagtaactaacattgattaggmacctgcaatatgtcagactctgtggcaggtgttttgcatctgggatctcattcaatccttaggccagtcctatgagatggtgttatcacccccatttacagatcaggaaactgaggctcagacaggttggatgacttgcttaagatcacatacccagcaagtgttggagtctgttttggaacttgcaactgtctgattaaaacatttcccactaaacatgctaaattctttaaggatgacttctttgccaagtggtttgtagccttcctgcttcccatcagcacaaatgaaggagttggagaaggtctagaggggagctctgccaaggccagaatgacatcaaatgtgctctgaagaagtaagcggctgggactgcaggagagatggctacgtggtcacttactgaatatctactgtgtgtctacgtagtgctttccatacgttttctcatttcatcctcacatacactcttcagggtaggcattattagctgcatcatttttgttgttgttaaggaaatgaagacttagagaagctaaatgatctgttcacagtcacacaactggtaaatgatggagctgtgattcatgctcaggtctgtctgactctgaagtctgactccttttcttttctttacctattctttttcttttcttttccttttcttcttttctttcgttttctcttttttttttttttttgagatggagttttgctcttgttgcccaggctggagtgcaatggtgtggtcttggctcactgcaacctctgcctccctggttcaagcaattctcctgcctcagcctcccaagtagctggggttacaggcatatgccaccatgcctggctaatttttgtatttttagtagagatggggtttcaccatgttggccaggctggtctcgaactcctgacctcaggtgatccacctgccttgtcttcccaaagtgctgggattacaggtgtgagccactgcgcttgggtctgacacttttcttttttttttttttttaatttttattttttttattgatcattcttgggtgtttctcgcagagggggatttggcagggtcacaggacaatagtggagggaaggtcggcagataaacaagtgaacaaaggtctctggttttcctaggcagaggaccctgcggccttccgcagtgtttgtgtccctgggtacttgagattagggagtggcgatgactcttaacgagcatgctgccttcaagcatctgtttaacaaagcacatcttgcaccgcccttaatccatttaaccctgagtggacacagcacatgtttgagagagcacagggttgggggtaaggtcatagatcaacaggatcccaaggcagaagaatttttcttactacagaacaaaatgaaaagtctcccatgtctacttctttctacacagacacagcaaccatccgatttctcaatcttttccccacctttcccccctttctattccacaaaaccgccattgtcatcccggcccattctcaatgagctgttgggcacacctcccagacggggtggtggccgggcggagacgctcctcacttctcagacggggtcgcggccgggcaaaggggctcctcacgtcccagacgatgggcggccaggcggagacgctcctcacctcccagacggggtggcggccgggcagaggctgcaatctcggcactttgggaggccaaggcaggctgctgggaggtggaggttgtagcgagccgagatcacgccactgcactccagcctgggcgccattgagcactgagtgaaccagactccgtctgcaatcccggcacctcgggaggccgaggctggcggatcactcgcggttaggaactggagaccggcccggccaacacagcgaaaccccgtctccaccaaaaaaatacgaaaaccagtcaggtgtggcggcgcacgcctgcaatcgcaggcactcggcagggtgaggcaggagaatcaggcagggaggttgcagtgagccgagatggcagcagcacagtccagcttcggctcggcatgagagggagaccgtggaaagagagggagagggagagggagagggagagggagagggagaggggagaggggagaagggagaggggagaggggagaggggagaggggagaggggagaggggagaggggagagggagagcggccctgacacttttcatcttacttagctgcttcttctgtggtgtggtgtattcccaggcttggggcatggtggaccgttacacggtgcacattgtaggttgttcctaggagtttctgagattaggcatcaggaagaagggatgacttgtcctgaggctcaagccctaattctagctcctgtccccagctggatcctttgccagagccaatcatctcatccaccacttcttaagaggcctcatctatcctatggcaattactaacacctggttgtagatgacatgctaatcctacccgggcccttcccctgagctgcagacctttacctgttcaccttccggacagctctttccagatgaccctgggaatgtgaacccagcacagccagatgaaatcatcaccttctcctgcctgcccttcctaatggtccccatttgagtgaatggcaccctctgaaagcctttcttttcaaatcctttcctctctcaagcatataaataacaacttggtgactgcatcctgtctttccttctgatggttcccttgctccacccccacaccactgccttggttcaggcctcgtgcctcctcccagatggttacctgcctttagtgttgctctgcccagctccatactatagctggagtggtggttgcagaggacacaggctctgaacctgtgatgtgctgtcacccatggcaagtcccttaacctttctgtgtctcctcctccctgtaagtgaaatgaagataacagaaccttcctggtagggtttgtgtgaattatatgatgtgatatagcatgtggataaagcatgtggaaatggatttggttcataatagacactcaataactattagccaatgcaagcagaccaraacagatgatgcctattctgctcaaagtcttctggtggctccccattgcctctggaattgaatccaggctccttatrggcctttgaatttggctccgaccatctctctagcatcatatcctgatatcctggagcttatcccttaccccatctctacctcttgtcttaccccaatattttttctactttatttttgtgtgtatttatggtgtatgacatgatgttttgaaatatctataaattgyggcatttccctacttttatttccatccatatggatagaaacttgggtttccaggatgcagcacaaggagcggggatccaatgtcttagttcaatctgctataacagaatactatagactgggtggcttgaacaataggaatttatttcttataggtttgaagtctgtaaggctgagaccagggtgccagcatggttgggttctgatgagggccctcttcctggtttacatgtggctgagttctcatggtgtcctcacatggtagatagagagcacagagaggaagcaagccctcttacatctctccttatgtgggcactaatcccatcatgggggctctaccctcaacacctaaacacttcccaaaggacccatccccaaatatcatcacattggtttcaacatatgaattttggggaatacaaacattccgttcatagcaccaaggctaagcccaggagagttcttgaactgaggagatggactgagtctgggagagcagggcagatagaatactggagaggagacagctgcacagagagaactctggagagcttcagagggccccactcaagaactcagtgcagaactcatcagggcctgcatgtgagaaaattacttggggccagggaaagtccattcaaaaaggttagaggtaacagtgcctagtgttcacacagggctgagaacacactctagctgtttctaccagaaagatttgaaacctcatggttcttaaggcatggagtatggaactaagataggtcttgcctcactagtggaaataatgagcacagaacctgcctaacaaattttaaaagcaaaagcagaaaggattttaaaagcaaaagcagaaaggatctctgtttccaagtaacttaactgcattacagaaacatagtttaagaatatgtataggaatacaaaaatatccagcaccccaaaaggtagayctataaaatctggcatccaataagaagttatcaggcatgccaagaatcagaaatatgttatccacaatgaggagaaaaattaatcatttgacatcaatccagaacagcaacaaatattagaatgggcagattaagacayttaacttgttattttaactgtattccatatgataataagtagagatatgggagatacttaaaaaggccaaagtcaaacttttagagattaaaactataatggttgaagtgaaaaatacattggatgggattaatggcagattaaacattgtagaatacaaaattattgaacttgaagacatagtaatagaaactataaaaatgaacacacagaagaaaaaatagaaagaaatgaatatagcattagtgaactatgggacaatttcaggtggctttatatacatgtaattggagtcaccagaagaaaagacaggcagagtagtgggtggggcagaaaaatattttaaggaataatggtcacaaaatgtccaaatttgattaagactataaactcacatccaagaacctcaataaatcccaagaacaagaaacataaagaacaccacaccaaggtacatgacaatcgaattgctaaaaatcaatgataaagagagaatcttaaaagcaactacagagaaagatgttactatacagagaacaaagttaaggatggcagtagacttgccagaaacagtgcaaacaaggggacaatagagaaacatcattaaaatactgaaagatgaatactgtctactagaattctatacttaacagacatgtctttcaaaatcaaaggytaaaaaaattcattgccaacagacccatatgctaagaaatgttagaagaagtcttctggacagaaggaaaatgatatcaagtgaaaatcagtatctacacgaaagaataaagagcactagaaatagtaactacatatgtaaatatatgacattttcttatcacttaaaccttaaagataatgtttgtgtaattaaaaataataacaatgtactgcagggtttgtaacatatacaaaaggaaaatgtataataacatgaacacaaaagttgggtggggataaatggaactaygctatcgtaagtttcccataccatacttaaaatggcatcatatcacttgtaagtggactataacaggttaaatatatatatacatatataaaaaataaactaatgaaatgattaacaaaacaaaaagtgatggtttataaaccaacaaaggagataaaatcataaaacatacttgcttaaaccaaatgaaggcagaaaaagagcaaaaaataaaaaaatgggacaaatggaaaacaaatagtaagatgacagatttaaacttggccatagtaataatcacattaaatgtaaatggtctaaacaccccaatttaaaacatttcagactgaataaaaaacatggcctaattacacactgtccacaaaaaacacaccttaaaaataaaatacacaagtagattaaaaataaaaggatggaaaaagatatagcatgctaacattaattaaatgaaaacttatgtgtctatattaaatttcagagccaaaaaaattatgaggggtaaagaagatgattttgtaatgggaaaaggatcaattcatcaagagaacataataatcctaaaattttatgaatctaataagagtcttaaaatacttgaagcaaaaactgaggtaatttcatggaaaaaatagacaaatccacaatcttagatgtttcaattctcacttctcaataactgatagaaaaattargaaaatcaataaagatacagaagttttgaacaccatgagccaatttcactaaattcacatttagtgaattacttttgtgagtgcaaaagtaattgtggtttttgcattgttggaatttgctctttgatattggaatacattcttaaataaatgtgttatgttatacatcactttaatgggcatttctcatttttttttctaatgacttattacttgctgtttattctgtttattttatgtttattttagactatggaaatgatgttagacaaaaagcaaattcaagcgattttcttatttgacttcaaaatgggtcgtaaagcaggggagacaactcgcaacatcaataatacatttggcccaggaactgctaacaaacgggcagtgcagtggtggatcaagaagttttgcaaaggagacaagagccttgaagatgaggagtgtagtggcttgccatcggaagttgacaatgaccaattgagagcaatcatcaaagctgatcctcttacaactacacaagaagttgccaaagaactcaatgtcgaccgttctatggtcgtttggcatttgaagcaaattggaaaggtgaaaaagctcgataagctcatgaactgagcaaaaataaaaaaaaaatcattttcaactatcatcttctcttattctatgcaataacaatgaaccatttctcgatcggattgtgatgtgtgattaaaagtggattttacatgacaaccggcaataaccagctcagtggttggactgagaagaagctccaaagcacttccaaaagccaaacttgcaccaaaaaagtcatggtcactgtttggtggtctgctgccagtctgatccacaacagctttccgaatcccagcaaaaccattacatctgagaagaatgctcagcgaatcggtgagatgcactaaaaacggcaatacctacagccaacatttgtcagcagaaagggcccaactcttctccatgacaacatccgaccacttgttacacaaacaacacttcaaaagttgaataaattgggctacagagttttgcctcacctgccatattcacctgacctcttgccaattgattaccactttttcaagcatctcgacaattttttgcagggaaaaggcttccacaaccagcaggatgcagaaaatgctttccgtgagttcgtttcaatcctgaagcaaggattttttacgctacaggaataaacaaacttatttctcattgacaaaaatgtgttgcttgtaatggttcctattttgactaacaaagatatgtttcatgtggctttcataccagggatgcagggatggtttaacatctgtgatggttaatattgagtgtcaacttgattggattgaaggatgcaaagtattgttcctgggtgcgccctgagggtgttgccaaaggagattaacatctgagtcagtggactgrgagaggcagacttaccctcaatttgggtgagcatcatctaatcagatgccagtgcagctaggataaaaacaggcagaggaatatggaaggactagactggctgagtcttctggcctacatctttctcccatgctggatgcttcctgcccactaatatcagactccaagttcttcagctttgggactcttggaccttcaatcacagactgaaggctacactgtyagtttccctacttttgaggttttgggactcgaactagcttccttgctcctcaccttgcagacggcctattgtgggaccttaccttgtgattgtgtgagccaatcaatactccttaataaactcccctttatatatacatctatcctacttttctgctcctctagagaaccccgactgatacaacacccacaagtcaatraatgtgatacaccacataaacagaattaaaaacaaaaaaatcacatgatcatctcaatagatgcagaaaaaatatttgacaaaatctagcaccactttatgattgaaacccttggcaaattcagcatagaagagacataccttaaggtaataagagccatctatgacaaactcacggctaaatgaggaacattatactaaatgaggaaaagttgaaagcactcccccgagaactggaagaagacaaggatgttcactttttccacttccattcaacatagtaatggaagtcctagccacagcaatcagagaggagagaaaaataaaagacatccaaattgataaagaggaagtcaaactgttgctgtttgctgatgatatgatcgtatacctggaaaaactctaaagactcatcaaaaagctcctagaactagtaaatgaattcagcaaagtttcaggttacaaaattaatgtacacaaatcaggaactctgctatattccaactgtgaccaagccgagaatcaaatcaagaactcaacccctttcacaatagttacaaaaaataatacttaggaatatacttaaccaaggacatgaaagacttctacaagacaaaccacaaaacattgctgaaagaaatcatagatgacacaaacaaatggaaacacatctcatgctcatggatgggtagaatcaatattgtgaaaatgaccgtactgccaaaagcaatctacaaattccatgcagttcccatcaaaataccatcatcattcttcacagaattagaaaaaaacaatcctaatattcatatggaaccaaaaaagagcccacataaccaaagcaagactaagcaaaaagaacaaatctggaggcrtcacattacccgacttcaaactatactataaggccatagtcaccaaaacagcatggtactattataaaaataggcacatagactaatggaacagaatacagaacccagaaaaaaagccaaatgatctttgacaaagcaaacaaaaacataaagtggggaaaggacaccttatgcaacaaatggtgctgggataattggcaagccacatgtagaagaatgaaattggatcctcatctctcatcttatacaaaaatcaactcgagatggattaagggcttaaatctaagacctgaaaccataaagattttagaagatagtatcaggaaaactcttctagacattggcttaggcaaagacttcatgaccaataacccaaaagcaaatgtgacaaaaacaaagataaatagatggggcttaattaaattaaaaagcttcttcacagcaaaaggaataatcagcagagtcaacagacaacccacagagtgggagaaaatctccacaatctatacatcaggcaaaggactaatattcagaatctacaatgaactcaaacaaatcagcaagaaaaaaaaaacaaacaattgcatcaaaaagtgggctaaggacatgaatagacaattctcaaaagaagataaacaaatggccccaacaagcatatggaaaaatgctcagcatcactaattataatggaagtgcaagtcaaaaccacaatgtgatatcaccttacccctgcaagaatggccataataaaaaaaatcaaagtaatggatgttggcatggatgcagtgaaaagggaacacttttacactgttggtgggaatgtaaactagtacagccactatgaaaaactgtttggagattccttaaagaactaaaagtagatccaccatttgatccagccatcccactactgggtatctacccagagggaaagaagtcattataccaaaaagaaacttgtacacacatgtttatagcagcaaaattckcaattgcaaaaatgtggaaccaactcaaatgcccatcagtcaacaagtggataaagaaactgtggtatatacatacaatggaatactacttagccataaaaaggaatgaattaatggcattcacagcaacctgggtggaattggagactattattttaagtgaagtaactcaggaatggaaaaccaaacattgtatgttctcacttatatgtgggagctaagctatgaggacacaaaggcgtaagaatgatacattggactttggggactcaggggaaagggtcgggggtggtgagggataaaagactgcacattgggtacagtgtacactgcttgggtgatrgatgcaccaaaatctcagaaatcaccactaaagagcttattaatgtaaccaaacaccaccggtcccccccctcyaaaacctattgaaataaaaaattaaaagtaaaaaaamcgtgtttgaacctagttataatgatttaaaattcatgggccaaaactgcaattacttttgcaccaacctagtgcaactccacccagtgagagcagaatatacattctcttcaaacacaccatgaggtcttcctgcaaccttccctgatccaacatggcttcgtggctgtgcagcatctctgcagtgtcacagtggctactggaaggcccaggcctgtgctggggatgttgcagctgcggctgtgctgcatttctatcccaaggacaacgaaggctactggttctgytccctctttgttcacaaagtggatccctggaaggatgcccactctgccctgctgtccaagaaggagaccagcaacctctacaagatccagtttcacagtgagaagcctgagtgcccggatgcctatagtaggcactgatggaggcagcactgtccatactgcactaggatgaggactaccctgctccctcatgggcaagtggaacacgtgctgtagggagcaggaccaggcactgcacctgtggaggttctcaggtggctactcagccctcgcggactgcatgacaaggagtacctggaggtccrgaaggagtgcagctggatgctgttgtccaggagacaccaattgctccttgagttcagcttctggaatgagccatagcccagcgtggaccccaacatcttatgagctgaggacatgcaagctkaagccaggaaccatgatggagtaggggaacaattggggtcctgccagcaggtaccagcagcaagtcccagcaggagaaccaggaggtgatcgtggctcctcccaaataggagagctccaccttgtgcawcatctctggtcctataaagacccacagtcttgggaggagacccgaagtgctgcctgcaggaagagggcttgggatgaaatgtctattgtacagttcccctcgggcaacacktggagtcttggatcctcttgaggatcctcttgaggtcctcttgaagacctcacctctccagtcatgctcccaacacttctaccttcttccctttctccctcagggcaaccctggacagaggagcaccccagtcctactgtcatggttttctcttggctctgggaggactctgagggtccatgcttagctcagacaacggggaactgaaggatgacaaattctgaggacttagagctcagctcagctccttcctgccttcccctcctccctccttccccctgctggaagtagttcctaatttctctgaatgaaacatagcaatcttctaggtctgctgacatcttttcctaagatttctcagtccccagctatcaccacagaaatcctcggtttagcttaattgcacaaaaggaagtatgtccagtggttagaggtgggatgggagggaaggaggtcaggtcaggccaagccaggtcctcaggaattccctgatctccactgagccactgccacccacttgctgtttagtctaaaccaagtccctcctgatggggaaaatcctggaactgctaaaaaaaacccctcaaatcggcaaggtcaggaggatgtccagacattccatccaaaaagacagggaaaaaggatgggacccaggaaggatttaggggcaggagacagacatgtaacagaatccagaaggtacaacttagaattcagaacttgagtttgaactgcagaatttggaatttggaatacagaattggaagatagaacagaggtgacaggctgggcgcggtggctcatgcctgtaatctcagcactttgggaggctgaggtgggcagatcatgaggtcagaagttcaagacaagcctggccaacatagtgaaacactggctttactaaaaatacaaaaattagcctggcatggtggcatgtgcctgtaatcccagctactcaggaggctgagccaggagaattgcttgaacccgggaggcggaggctgtggtgagccgagatcttgcagtgagccgagatcatggcactggactccagcttgggtgacagagcgagacttggtctcaaaaaaaaaaaaaaaaaaaaaaaaagaaacagttggaatagaagaagtctggggcatatcatttagatgctaaaaaaaaaaaaaaaacaacatttccaggacattttaaaggtatttggaatcagggctgttgctcccggtggagtaggttcccagggagactgggacacagaaaagaagggacttggagtcccgtctgctgggcactcagctcaaagctcacacccctgacggactctgcttgacgtttacatgttacccttctcaaacggggcttctgtgcctcctggaaatttaggtaagcttggttcaaccctcccaagttacagcctgcgaaagctgagggtcttcctcatgatcctggacaattcctgatggcctaattcttcagtctgttcttttcggcattagagggtgcagcctcctgccatcttggataaaaaacccagtctgcagtggtttcactaagggtgctcccaacagatgattcatgggtgtgggggacttgctcaagatttgaggggtctcgccaggctccccagaatcttcatccatttcactgttcctctccccttcctctctcttttcctctctttttcagggtcaccagccctcttcccaccatctaaagctcatatgagcttactgtgtggacccactcagaagcccagagttggaataaagattattttaaactgaagacatttgaggttcaacagaygcagagaaaagcctcctcagagcttcccttatctgactaaaagcagcaacttctggtaaatgaagctaccatagatcccttctccgggggagtttcatggccctgaggaagatggaaagaccacctttatttgtaaggaaagacatcaccacactcttcaaaaaatgtcctgttatcctgaaaaaaatgtatttcctaaagaagcccatctgtatttcccataggagccttttctccctcctccctttcccctactaggttaggtatttaagccccaaattctaatcacgactttgagttactcatcactgaacactcaggcttgcgtaagtaaactcttctcttctcttgcgaatgtgtcttttgtcagtttaatttacagagctccaatcaccaaacctaaaaagatagagaaaaagtttacctctcctatattatttatcttctgcctcctcctctaaagtctcagcttctaacccaggtaagattatctaggaatcgtcccsagaaaggcgtgtttcctaagcctaccggtaattatgagagaagaaaaattttccttctagctgcacaggtattacatggatggggtcaggataaacccacattactcaaagaaatatttgcatttttaggccaaccactatccacagaatctctgggcttaactattccttagggagagcacaagaaggaaattgcaaagcttttgtcaaaatatttggccaccaaaaaattcctgcttgcttcacagagacagatgcgtgaatgccacagcactatctgttctgtgttttatgatcctccccaaaataacagtctctgttggatttgcgctggtgatttgagaataagaaactttaaaaacaactagacaaccagttcaagagagcagataatgtatattcagcagcctccccctcctgccctaacttctgagagtgacagaaataattattgtaacaagttctcattaccatgctgggaaggaaggagagaggcagttgatggacagtaattataagaagctccttagatgaagcaaggaaactgcagtcaaaaatcatctgtaggagaggaaggatgcaaaagatgggcaagggggcaagggcatggcaggcctggagattgtgatgccaggatgagatgggaccctgatgctcctgatcgagccacagatgggagatgccgcccctttatcaggtagcaaacaacgaaatgtcttgttttaagaagtagcaagttcgggcacggtggctcacgcctgtaatcctagcactttgggaggccgaggtgggcagatcacgaggtcaggagatcgagaccatcctggctaacacggcgaaaccctgtctttagtagaaatccaaaaaagttagccaggcatggtggcaggtgcctgcagtcccagctactcaggaggctgaggcaggtgaatcacttgaacctgggaggtggaggttgcagtgagccaagatcgcaccactgcactccagcctgggtgacagagcaaggctctgtctcaaaaaaaaaaaaaaaaaaaaaaaaaaagagggagcaataagtgtggttttttgggtcagagaggcagactaggatctggggtggctgacaactcccagcaaaaccagacagcccatgtgcccagaaggttagttaatgcccctctctcctacatgtctcacatctctgccataatcaagagagaggctgaggtatctgcctgggtagcacattcaaccccttcctatattcaggctagtgtacatcagtgtaacttctccagcctggcgcacagagacttttacaaacaaagatgagcttacaaacaacgatgagcatacacccagaagccaacaacacttgagggaagccagcaccgtgaaagggacatcaaagtcaacacatgaacttatatctgagaacaaaattaaaaacgcaagtggagcagggccttgagtacatgtagttattatccctagaaagagatgagaagggaatagtatgtagctataaaaagaatgagttcatgttctttgcagggacatggataaagctggaacccatcattctcagcaaactaacagaggaacagaaaaccaaacactgcgtgttctcactcataagtgggagttgaacaacgagaacacattggacacagggagggaaatatcacacaccagggcctgttggtgggtggggggcaaggggagggagagcattaggtcaaatacctaatgcatgcagggcttaaaacctaggtgacgggttgttaggtgcggcaaaccaccatagcacagtatagctatgtaacaaacctgcatgttctgcccaagtatcccagaacttaaagtgaaaggaaaaaaaaaaaaaagaaggagatgagaagagattgccctaagaatcagtctgctacccccacgttcatatcagcattatcctcaatagcaaaaaggcagaagcagcccaagtgtccattgatggatgagtggataaaccaaaatgccatcttcatccaggagaatgttaccagagaatgttcagccttaaaaaggaagaaaatcctatcacatggaggaacctgaagaagacattatgctatgtgaaatacgtcagtcacaaaaggacacatactctatgattctgttcatgtaagtgacctagagtggtcaaattgatagaaagttgaaaggtgatttctagagcccagggggaggggaaaatggagagttggtgtttagtgaaaacagtttcagtttgaaaggatgaaaaagttctggagatggatggtgatgatggttgcaaccatgtgaacatactcaatgctactgaactgtacttttaaaataattaaggtggtgattttgtgttatgtgtgttttatcataattaaaaaaatcaacttgatatcttggaaataaaaaatcacgattgaaactgacaaaatagaaagttgagcagattggcctcagctgaagtgtaaattagtaacytagaagactgaactgagaactttagaatgcaacactgaaccaaccaagagaaacataggaaaaaagactgatgcacgtagcataaatttagaatttctaacattcctataataaaaacgtcagaaggattctaaaggattattagtattacttaggaataataggatgcaaaaaatggtggcttaacaagatagagattacttatcgaccaaagaaaagtacagaggaaaggagagctggtgtatggctctacaagtatcattgaggaccctgattcctgtcttcctgctttgccagcccagcacatgggctcttgaagctcacctaatggctgcaggcagggaaaaagagaaaagccagacctgcccagttaactcaactccctttaagcaggcttcccagaattctgcaaaacacttgcttagatctcattgtctagaatttaaacacgtggccacagttagcttcgaagtagacattcttcatggcaatgtgtcctgctaaaatcagtattctgtttctaagaagaaaggagagaatagctattggggaagccagtggtagtagctatccactccccgcaccccaaatacagagaatgaagagtggggacaaatgcaaaataaggatagaagtaaaaaaatcccagaataggagaaaaatatgagttctcagactgaaaagctccactgagtaccaaaatgggatgaatgcaagaccattggacacattgtagtgaaatttcacaataccaaggatcaagaaaaatcctaaagacttccaaagagtaaaaaacaaccaacaattctctataaagaaaagagaatcagccgggcgcggtggctcatgcctgtaatcccagcactttgggaggccgaggcaggcagatcacttgaggtcagaagttcgagaccagcctagccaacatggtgaaaccccgtctctactaaaaatacaaaaattaactgggcatggtggtacatgcctgtaatcccagctacttgggaggctgaggcaggaaaattgcttgaatccaggaggtggaggttgcagtgagccgagattgtgccactgcactctagtctgggcgacagagtgagactccgtctcaaaaaaaaaaaaaaagagaaaagagaatcagactgagaagatgtctatctttttattatcaacaagggttgcaaggcagagaagcagtttcttcaaagctaagaatgaataaa

SEQ ID NO: 93489 - DNA, 13693 bp, Homo sapiens
gatagactcttaagatagactccattttacagggaagcggtgagggcactgagagcgtaagtaacaccttggcaagcacacagcgaggaaaagccagagctgagattcgaacacaggcgagcaaactcaaagccctgctgtcactcaaccattcctttgattgtaaaactgaggaagtattcagctggtataattttaaaaaaaattattcttaaccagtatgattttaaaaaatagctcagtgagtatttcttagagttacatgattgtgtgtgacacaatgacaaaaactatttttttttttttttggagacagggtctcgttctgtcccccaggctggagcaatcatggctcactgcagctttgacttccttgactaaagcgatcctccttccttagcctcccaagtagctgagagcataagatgtgagccactacacctcatttttatttttagtagagatggggttctcattatatcgcacaggttggtctcgaactcctggggtcaagtaatcctccctcctcggcctccaaaagtgttgggattacaggccagagccactacatctggctgacacagattttttttttttttttttttgagatggagttttactcttgttgccgaggctggagtgcaatcgcgcaatcttggctcactgcaacctctgcctccagggttcaagtgattctcctgcctcagcctcctgagtagctgggattacactcacgtgccaccacgcctggctaattttgtatttttagtagagacagggtttctccatgttggtcaggctggtcttgaactcctgacctcaggtgatccacccgcctcagcctcccaaagtgctgggattacaggcgtgagccaccgcacccagcccacaaactcttaattcagtgtaattaagtgtaaactcttaattcagtgtaatggctcaggtaccacagaaccctgcctacttcctgagaaacactgtaagatttccttcagactttgagacaccatgtggctagatgtgtcttcaattcacagcaaggagaggcctgtaggacccagtgaggagggatgcataaattgcccctaaaagaccaagtagaatttctggcaagtaacgttccataactggcaggtttttgggcctggcctggtmaactgtcaacagtatccaaaacatggctccgaaccatatttctctgacagtttaacataaattcttccaggttctgtttaaagccatttcctcttagaaagtagctgattatcrtctgctgactattaagctatgaggtacttaatatccatttaaggtttcggtacagccaagtcaaattcagcttgcatcctggaaccttgtaacaagcagcgatgttacttctgggcatcttctgtaaccacctcctcacgtctcactgacctcatcctggcccaggggtgcagttccttactcctagaaagcgctagcccttataagaatctataaacttcctaaaatagaactaacctttattttgcttccggcagtagttgggcgccctttcttgtcagcctgcagattttccggaaataaagactttatgaaaggcctggaaaaggagaaagagaatgaattaacaatctgtaagtacctctggggctgaaagcctgcctttctagaggatggggtgaagggccgtccccaggcacataaccttggctacagaaaagccatctgactcacagcgcgggccatcaagatgtgacttggggaaatgaacaacggacaaaagtcatgaagggaaagaattctaagatataagcaatttggaatcaaagactgcaaaataaattttaaaacattgcctttccaacgtccctagtcacaggaattgaggtatatcttgacagaacataacagagggaggtcagtaggggattttaggtttttgttttgtttttgagacagggtctcgctctactgcccaggttggagcgcaggggttcaatcatggctcactgcagcctcgacctcccagactcaagccatcttcccacctccgcctcctgagtagctggcactatatataggcagacgccaccacgtccagctaattcttgtattttctttagagatggggtttcgccatgtttcccaggctggtctcaaacaactggactcaagaggtgctcctgcctcagcctcctgaagtgttgggactacaggcatgaggcactgcgcctggccagcatgtgtttgttaagacaagcaagatagaccagagctcagggaattatatgaaatgtctggattcagtgcagatgctgctttgctctagagcagagtttctgagtctgggcaccattggtatctgcggctgaataattctttgttgggggccgaggagggcgcctcttctacatattgtgggatatttagcagcatccatggtctctgctcaccagatgccagtagcacactgttcccagctctacacagaaaaccctgacaaactgcttttgagtatgagcaattttaagcggagcagtaacaaatcaccaggctctgccggctgaatatactttcttttttttttttttgagatggagtctcgctctgtcaccaggctggagtgcagtggcgcgatcttggctcgctgcaacctctgcctcccaggttcaagtgattctcctgcctcagcctcctgagtagctgggactacaagtgcgtgccaccacagctaatttttgtatcgttagtagagacggggtttcaacatgttggccacagtggtctcgatctcttgacctcgtgatccacccaccttggcctcccaaagtgctgtgattacaggcatgagccactgcacccagcctgaagatactttcattagtggtgctatttgagctgcatgtgtttatacgtctgcctcactagcaacagggcagggacaatgccttactcatcttagtgtccctggtgtctgaagcatagcatggtgcacagttggtccataatatgtatttgctgactgggtgaatgacgggatccatgtaaattagcaatctgacattcaaactcaaactcacttcctcctcaatgactttttgggcatcttgaattttccaggaagtctccccagcagtctacttttaacttgaccagatacaactacagattttgacatcaagtgtgtttacaaaataataggccatgtccgtatgacagcagtttatgtggaagcaataatagctcttaaacttggcasgaattttaataattttttaaaaacaatctctggaagcaagtctgcacctgactgccataaaacccacaagccaggacttgtggcttacctaaacatctcagagaagaacaaattgattatgtatgttttgaataaaaagaaatgcaaaatctcagaaatggtggtgtggctgcaaggaagcgcagggatggagagcagagggtgaggaggggtagggagctacagggagagaagtaaacggagcagaacagctgaccagggcctgaaaaggaaactcttgctttgctttcattgcagtcagccctttaataggaaattatcaggctcgctgctgttgatcagagaagctggccttgctattgtgacagcttaactaatagagagcaaaagggcagctcttacttgaaagaagctctagaaattgtaagatctggcatgcatgggccttgcctcgcaagcatgatggacttgctcatgtaaattacatcttatgtgttatccaggatcttgagaaccttttcagggaaaaggggaggaaggcagaggtggtcttgagagttctagcagcgtgcaagggggataccctccctcttctacccctacagctgaaacagggtcttgggagttaaaatggatctcttagtcactccttctttagttgtccctcccagagttctcaagccatttcttcagtacttcagggactctggttaatgtgggtcttgctaagccattaaccatctttaaaaattcaacgaccatgaagaagagctcaggggcaaagtatcatagaaccagactgttccactcttaaatagtcagaaatggccatcccaatccaaagccagtgggcttatttctccctgataatagtattgaaaggtagaaagcctgaggccctgaaggacctgtagatggcacttggaatttgggggcatgaagtgttagggacataaaagggagagactgatatagagaaaagaaagctattttgagaaaccaaatagattaaatgataatccagacccaatagcatgaaggaacaaaatgctaaccactaaacatcacaggtgttttgttttgtttttgtttttttctttattagagacacagtgttcctatgttgcctggctggagggcagtggctattgacaggagtgatcacagctcagtgcagcctcaaactcctaggatcaagtgatcctcctgccttagcctcctgagtagctgggactataggaacacaccaccacacccagctcataagtttgttttcatattgaaaatttcatcaaacctatatcccctgtcagctatggcaaaacatacttacagctcgctgctctgcataagctcgatgagatccataaaaagcacatcccggttcctttcacaaaagccatccatgtcataggatacctggccaagaatggaaagaaatcgaatttcattgaacaaaatgtaattaattgaacaaaatcatttattgaacaaaaaatctaatttcaccaaacaaaaaaccaaagctgtcatggctaccctcaccacaacatgtggatttccagatgttgcatttgggatttcattgtgcactgtcacaggaaggctgtgcacgtcttacttgttagctgacttagtggggaaggcctgcagatgctgatgagtatctggctgcctggatggcccagctgatccgtaatcagaactccagctctcaagtccccataccccttcttcagtggatccataggggtgtctaagtgacatactcaatacttttcctaaattttagctaagccagagcaaaagtgaagcccctcatgctcagtaattcactgcaatgagccatgtcatctgaggctttgcagtttctcccagaagtggtatcaaagttgcaccaatctggccagaaactcatgctcagatactctgtttaacaagagatcagctgggatgatggatgagaccaggggatttccatagcactaggaagtccccaagaccacgacctcaacttaacttttttatcatcagcagccccacacagcctggcatccagtaggcacccaatactgatgggctttataagaacaccaaaagtgcactctgggccttgatttatactaccagtaggcatggggagacaaggaatgccagtctgtgattccagcaagaggcaagacgaaaatccatttattcagcagctaatacatgtagcagggtgattcattttccaaaaatatgcagtagtatgctgagatttagtgctggagtgactcccagccggcccctaccctgctgaagccccagccgactgtcccagggtgggtcctggccaggactggcaccaaggcagtggaatcctttcaaaataggcctccagcgccatagaccagaaagcaggcgcccaattctgggacactgggagatggtgcaggcagccaccagtacgcaaagcatagagccctatccttcctggcagggtcacggttcagaaaacgtaaccttattttcatctgtagttaacagaagcatgtttcctcagcattcatattaaaaataaaaaactagtaattccagggatctcggttagcctcttaagcatgtcaactattgataatactcttagcaaaactaactccagaaatcacttgctagagaagcagcccttcactgccttagtctgagcacccacggaaagcacgtgtcggagactctggcaaggcccgcgcagccgcagtagagggccagggggcggggcacgcgcacctgccgtagagtgctgaaggtcctgccaacggctctcttggcgtctcaacgttcggatcagcagcttttttccattctctctctcyacttcttcagtgagcagccatgagttggactgtgcctgttgtgcgggccagccagagartgagctcggtgggagcgaatttcctatgcctggggatggccctgtgtcygcgtcaagcaacgcgmatcccgctcaacggcacctggctcttcacmcccgtgagcaagatggcgactgtgaagagtgagcttattgagcgtttcacttccgagaagcccgttcatcacagtaaggtctccatcataggaactggatcggtgggcatggcctgcgctatcagcatcttattaaaaggcttgagtgatgaacttgcccttgtggatcttgatgaagacaaactgaagggtgagacratggatcttcaacatggcagccctttcacgaaaatgccaaatattgtttgtagcaaagattactttgtcacagcaaactccaacctagtgattatcacagcaggtgcacgccaagaaaagggagaaacgcgccttaatttagtccagcgaaatgtggccatcttcaagttaatgatttccagtattgtccagtacagcccccaytgcaaactgattattgtttccaatccagtggatatcttaacttatgtagcttggaagttgagtgcatttcccaaaaaccgtattattggaagcggctgtaatctggatactgctcgttttcgtttcttgattggacaaaagcttggtatccattctgaaagctgccatggatggatcctcggagagcatggagactcaagtgttcctgtgtggagtggagtgaacatagctggtgtcyctttgaaggatctgaactctgatataggaackgataaagatcctgagcaatggaaaaatgtccacaaagaagtgactgcaactgcctatgagattattaaaatgaaaggttatacttcttgggccattggcctatctgtggccgatttaacagaaagtattttgaagaatcttaggagaatacatccagtttccaccataayyaagggcctctatggaatagatgaagaagtattcctcagtattccttgtatcctgggagagaacggtattaccaaccttataaagataaagctgacccctgaagaagaggcccatctgaaaaaaagtgcaaaaacactytgggaaattcagaataagcttaagctttaaagttgcctaaaactaccattccgaaattattgaagagatcatagatacaggattatataaygaaattttgaataaacttgaattcctaaaagatggaaacaggaaagtaggtagagtgaytttcctatttatttagtcctccagctcttttattgagcatccacgtgctggacgatacttatttacaattcctaagtatttttggtacctctgatgtagcagcacttgccatgttatatatatgtagttggcatttggttcccaaaaagtaggatgtaggtatttattgtgytctagaaattccgactcttttcattagatatatgctatttctttcattcttgctggtttatacctatgttcatttatatgctgtaaaaaagtagtagcttcttctacaatgtaaaaataaatgtacatacaaaaaaatgcagtagtatatacaatcttttgttttgcttcctttgatagttaataaattccgtttgttgaatcaataaaatacggcgagccatatgatttgcttcatgagaaaccagatcacaaacccaaaggcttaaaacagatagacattaaaatggatattggccataccttcccagcataatgatgaatgatgaagccttggttccaactgttgaagtgctcatgactcccaatctgcatctgaagtttctggagcagcgtctgatctgccccctcacccaccgcatgcatcgtggcgcacacgtcatccaggatgctcatgatgccaggagggttctgatgggagcaagaaggcaaggccctagtcactgacctctccaaaacagacaatgcttatcaggtcctttcttaggcaaggaaacagctccccagacttaagataccatcttgaaagtcagtattccccttcaggcaagaatgcaattaatagtcccaaatagggagtcaccacttagatctaaagagggaggaaactccactttccaaaaagctgtttaactccctgaagttttatccaagagtcatgcacagatcattatctgctcactcatagtcatgccaaattgacttgcttaagaatccaaaagtaaaaacattttcctttgacctaatctatttcttaatgttctctttcagcgtgttacccatataggcatcatttcggtagttatttagtgtacacattctataatgcatttcctttttcacatagcactattttataagcattcctcatgttttacacattcttcacacttactattttaatggctatacttctctgttctgatatgctatagtttgtttaataactaagttgtctggccgggcatggtggctcatgcctgtaatcccagcaatttaggaggccgaggggggtggatcacgaggtcaggagttcgagaccagcctggccaacatggtgaaaccccctctctactaaaaatacaaaaattagccaggtgtggtggtgggcgcctgtaatcccagctactcaggaggctgagacaggagaatcgcttgaacccgggaggtggaggttacagtgagccaagatggcgccactgcactctagcctgggcaaccgagcgagacgtctctcaaaataaataaataaacatgtaaataaataaataaataagttgtctacggatgtttttactgtttccagtttttggcttttatatatataaaaaaatcctatagagatatttgttctgtatcacttttattttgaatcacctttttttttttttttttttttttttttttttgagacatggtcttgccttgctctgtcacccaggctagagtgcagtggcacaatctcagctcaccacatcctcaacctcccaggctcaagcgatcctcccacctcagcctccagagtagctgggactacaggtgcgtgccaccatgcctggctaatttttgtatttagctaatacaatttttgtattagctaaattttgtgtttagaaatagggtttcaccatgttgctggggctggtcttgaacccctgtgctcaagcgatccacctgcctcagcctcccaaagtactgggattacaggcacgagccaccatgaccagcctgaatcagtcattaaggctaaagtcctagaagttggactagaacacagggccaattttatggctctttccatgctaagtcatcatgtgatcctgtcttctcttagaattcaataacaacttccatttgtacattgacattttactcatatccacatgttcatatttactgccagaataaagccgtactgttctcttttcacacatacagaaaactagtacaattgctcaaattctctgcaaatcagagttgtcactttgcctgttctaaaacaatgacacagagaataaaaactcacttaatgtaaacctgtgagcagtgaaaagacatactaaatgaacacttaccactttgttctctatgaggtcacatacgattttattattaaagtactcaatgggtgtccatcttattccctcttgaacatattcttcctgtaacacagagacaaggaactcacattatttcccagatagcaagagctctgcacggacagaccctgaatggacaaaaattcccataaaagagaaaaacctgaatgtcctgcaacaaagaccagggactttaatttttattttctaagaggtaacaggaaaggaacattttatgacttggtgatttttatgtttagtttgaaccctatgaaattattgccacacaactgtttctggccaaagaaaactacaatttagtagcaccgaactgataaatccagttacaaaaaaatcacaaaactcttaaaatttaacataggactgggcgcggtggctcacatctgtaatcccagcactttgggaggccgaggtgggcggatcacaaggtcaggagttcgagaccatcgtgaccaacatggtgaaaccctgtctctactaaaaatacaaaaagaagctgagtgtggtggggcgcgcctgtaatcccggctacttgggaggctgaggcaggagaattgcttgaacccagaaggtggaggttgaagtgagctgagattgtgccactgcacttcagcctggatgacagagcgaaactccaactcaaaaaaaaaaaaaaaaattgaatataggacaggagtacagattagcatccaggtacttaatgggaaggttcttcagtctatgagttgctcatttaacttgaacaccacaacaccatcctggttttttcctctttcctcactggtttcactttgtcagcttcctttgccaggtctttcttatttccagacctttatatgtggtagagtctcagggctcaatctttcagctttctcattttctcagccctccttctctaggtgatttcaatcaatcccatggctttaaataccacctacaggctaatgacccctgaatttatttctctagtctatacctcgccacggggttccagactcaaatccattctacagattggaatcttcacttggatgtatgataggcctctcccacttaacctgtttagaggaactctgattccatatttcccgtgacctccaaacaacccctcttctaatcttaccctccagtaaacagtgtcaccatcggccctgttatccagggtataaagctaagaatcacccgtgattgctctttctttcttggctattgctaattattttgagcaagtcccattctctcactctccagatactccccctccccacctacactgctaccatggccgtctaagtctctaccatgtctagcgcagtctcctgcagtatccccctcactggtttttaaacttccattctagtttgctttcccctgactcatcccactctataagtctatagagccagagtgaccctttcaaaaacacaacaaatcacatcatgtcactcctccctcaaaattcttcagtgggtcctcattccacttactgtaacacccaaagtctcagccatgccctgcaagttcccatacaatctagcccctgcctcccctctcccatctcactggctattgcactcttacttggttgttttgctctggctactctaagggttggggaaggctagaggttcacaggaaacccatatggaaactaccaaaccagttaggagactactgcaggagactgggctagacgtggtagggacttagatggcaatgggagcaatgggtttcatgtgaacctctagcctaccccaccccttagagtagctacagcaaaacaaccaagggcaggttccagggcagaaggtcacgtgaaaccccctggtatggtgtttcctaagcagaggcataaacacttccataactaaatgaccccaaacagcctttgatgtgtgtaatggcttgaatagtatccccccaaatttcacatccacctggaacctctcagaatgtgaggtttggaaataaggtctttgtaaatgtaattcactaaggatctcacaataagtcatcctgggtttagagtgaacttgaaatccaaaacaatggtgtctttcttttctttttctttttttttacagttcactctccatagagactgtcaaaaattgtcaatgctgactgtatttccagtcatcatggcagggtattgtgaaaagttttcaattagcaataatcatgcctcagatgaacagccctggctaaaatattgccattgcgcaaagctaaaatggtgtcttcatgaaagagacggagatttggatatagacacagagggacattgaaaaaggctacgtgaagacacaggcagagactggagtcaaactgccataagccaagaaatgccaggagccaccagaaactagaagaggaaggattctcccctctatcctgaggaggaggaggagtgtggccctgaggacttcttgacttcagactctgggctccacaactgggagggaagaaactgctactgttttaagtcactcagtttgtggtgctttgttatggtggccccaggaatcctaaacaatatgctatcaggaaacaatggaaactgcactgaactatttatttattattattattattattattattattattattattattattattttgagacgaagtctcgctctgtcgccaaggctggagtgcagtggcacgatctcagctcactgcaacctctgcctcctgggttcaagcgattctcctgcctcagccccctgagtagctgggtctacaggcacacaccatcacgcccagctaatttttgtatttttagtagagacggggtttcatcatgttggccaggctggtctcgaattcctgacctcaagtgatctgcccgtctcggcctcccaaagtgcagggattacaggcatgagccactgcgcctggctattatttatttttgagatagagtcttgctctgttgcctaggatggagtgcagtggtgtgatgatataagcctcgacctcctgggctcaagcaatcctttcacctcagcctccagagtagctgggactataggcttatgccaccacgtccagctaattattttattttttttgtatggatggggtctcattttgtcccgcaggctggtcttgaactcccgggctcaagcaattctcccgactcggcctcccaaagtgctaggattacaggcacgagccacagcacccagcctgcagtgaactttagaagaaactataccaaggcatgttacctcaggtaagtattcaaataccagctttgttaaaaatgcacgtattgttagggaagattgaaaatggcgtagatctgaggaaaccaagtcttttatttggaacacaatatttgccacagacagtcggggctggaactaggctcccatttcccacgtgctcaatgagtcagtagagtaaaagcagccagtcttacctccaacatcacagcatcatttgcttaaagaagaaggcaaatgctgcagacggtatttatatttcatagattaaaatgccacaatggcatatggtttttctgcctgactttattagatgcatttcctaatataagactggaaccgaaatctattaacaaaagacagaaatctataccctcttaaacaaaataaattataaatagaataggatgaaggaagagggactgcttacctgttctgcctttaatgtcagttcaataaaaatctgctgcagtttttcattaacaaaattgatacaaaactgttcaaagccatttttctggaaaaaaaaagttattcacatgtaattctttcacaaaatcatttaaaagtcatttctggagtgatttattgaaatgtcttcatgtgaaaagctttaatagaaatgttggatgcatcaaaagaaataagtttatatttaggagaaactaatttggtaaaggcacatgaagaactcacaaaggcaaaaatgagcctga

SEQ ID NO: 93490 - DNA, 12420 bp, Homo sapiens
agaatgactaactagagtaaacagtatagagaagaccttaaatgacctgatggagctgaaaaccatggcacaagaacttcatgacacatgcacagacttcaatagctgatttgatcaagtggaagaaaggatatcagtgattgaagatcaaattaatgaaataaagcaagaaaacaaggttagagaaaaaagagtaaaaagaaatgaacaaagcctccaagaaatatgggagtatgtgaaaagaccaaatctatgttgatttggtgtacctgaaagtgatggggagaatggaaccaagctggaaaacactcttcaggatatcatctaggagaagttccccaacctagcaaggcaggccaacattcaagttcagaaatacggaaaacaccacaaagatactccttgacaagagcaaccccaagacacataattgtcagattcaccaaggaggaaatgaaggaaaaaatgttaacggcagccagagagaaaggtagggttacccacaaagggaatcgcatcagactaacagcggatttctcagcagaaaccttacaagccagaagagaatgggggccaatattcaacattcttaaaggaaagaattttcagcgcagaatttcatatccacccaaactaagcttcataagtgaaggagaaataaaatcctttacagacaagcaaatgctgagagattttgtcaccaccaagcctgccttacaagagctcctgaaggaagcactaaacatggaaaggaactaccagtaccagccactgcaaaaacattacaaattgtaaagaccgtcgatgctaggaagaaactgcatcaactaacaagcaaaataaccagctaacatcataatgacaggatcaaattcacacataacaatattaaccttaaatgtaaatgggctaaatgccccaattaaaagacacagactggcaaattggataaagagtcaagacccatcagtgtgctgtattcaggagacccttctcgtatgcagagacacacataggctcaaaataaagggatggaggaagatctaccaagcaaatggaaagcaaaaaaaagtaggggttgcaatcctagtctttgataaaacagactttaaaccaacaaagatcaaaagagacaaagaaggccattacataatggtaaagggatcaattcaacaagaagagctaactatcctaaacatacattcacccaatacaggagcacccagattcataaagcaagtccttagagaactacaaagagacttagactcccacacaataataatgggacactttaacaccccactgtctatattagacagatcgacgagacagaaggttaacaaggatatccaggaattgaactcagctctgcaacaagtggaactaatagatatctacagaactctccaccccaaatcaacagaatatacattcttctcagcaccacattgcacttattctaaaattgaccacataattggaagtaaagcactcctcagcaaatgtaaaagaacagaaatcacaacaaactgtttctcagatcacagtgccatcaaattagaactcaggattaagaaactcattcaaaaccacacaactacatggaaactgaacaacctgctcctgaataactactgggtaaataatgaaatgaaggcagaaataaagatgttctttgaaaccaatgagaacaaagacacaacctaccagaatctctgggacacattcaaagcagtgtgtagagggaaatttatagcactaaatgcccacaagagaaagccggaaagatctaaaattgacatcctaacatcacaattaaaagaactagagaagcaagagcaaataaattcaaaagctaggagaaggcaagaaataactaaaatcagagcagaactgaaggaggtagagacaaaaaacctcttaaaaaatcaatgaatctaggagctggattttttaaaagatcaacaaaatagaccactagcaagactaataaagaagaaaagacagaagaatcaaatagacacaataaaatgataaaggggatatcaccactgatcccacagaaatacaaactaccatcagagaatactataaacacctctatgcaaataaactagaaaatgtagaagaaatggataaattcctggacacatacaccctcccaagactaaaccaggaagaagttgaatctctgaatagacaaataacaggctctgaaattgaggcaataattaatagcctaccaacaaaagaaagtccaggaccagatggattcacagccgaattctaccagaggtacaaagaggagctggtaccatcccttctaaaattcttccaatcaatagaaaaagagggaatcttccctaactcattttatgaggccagcatcatcctgataccaaagcctggcagagacacaacaaaaaaaagagaatttgagaccaatatccctgatgaacatcgatgtgaaaatcctcagtataatactgggaaactgaatcctgcagcacatcaaaaagcttatccaccatgatcaagtgggcttcatctctgggatgcaaggctggttcacctatgcaaatcaataaacataatccatcacataaacagaaccaatgacaaaaaccacatgattatctcaatagatgcagaaaaaacctttgacaaaaattcaacagcccttcatgctaaaaactctcaataaactaggtattgatggaatgtatgtcaaaataataagagctatttatgacaaacccacagccaatatcatactgaatgggcaaaaactggaaacattccctttgaaaaccggcacaagacaaggacgccctctctcaccactcctattcaacatagtgttggaagttctggccagggcaatgaggcaggagaaagaaataaaagatattcaattaggaaaagaggaactcaaattgtccctgtttgcagatgacatgattgtatatttagaaaaccccatcatctcagtccaaaatctccttaagctgataaggaacttcagcgaaatctcagaatacaaaatcaatgtgcaaaaatcagaagcattcctatacaccaataacagacaaacagagagccaaatcatgaatgaaatcccattcacaattgctacaaagagaataaaatacctaggaatccaacttacaagggatgtgaaggacctcttcaaggagaactacaaaccactgcttaacgaaataaaagaggacacaaacaaatggaagaacattccatgctcatggataggaagaatcaatatcatgaaaatggccatactgcccagggtaatttatagagtcaatgccatccccatcaagctaccaatgactttcttcacagaattgggaaaaactaccttaaagttcatatggaaccaaaaaagagcccgcagagccaagacaatcctaagcaaaaagaacaaagctggagacataatgctacctgacttcgaaccatactacaaggctatagtaaccaaaacagcatggtactggtaccaaaacagatctatagaccaatggaagagaacagaggcctcagaaataacaccacacttctataaccatctgatctctgacaaacccgacaaaaacaagaaatggggaaaggattccttatttaataaatggtgctgggaaaactggctagccatatgtagagagctgaaactggatcccttccttacaccttatgtaaaaattaattcaagatggattaaagatttaaatgttagacctaaaaccgtaaaaaccctagaagaaaacctaggcaatactattcaagacataggcataggcaaggacttcatgactaaaactccaaaagcaatggcaacagaagccaaaattgacaaatgggatctaattaaactaaagagcttttgcacagcaaaagaaactaccatcagagtgaacagacaacctacagaatgggagaaaatttttgccatctatccatctgacaaagggctaatatccaaaatctacaaagaacttaaaaaaatttacaagaaaaaaacaaaccaccccattaaaaagtgggcaaaggatgtgaacagacacttctcaaaagaagacctttatctcatcatcactggtcatcagagaaatgcaaatcaaaaccacaatgagataccatctcatgccaggtagaatggcaatcattaaaaagtcaggaaacaacagatgctggagaagatgtggagaaacaggaacgcttttacactgttggtgggagtgtaaattagttcaaccattatggaagacagtgtggcgattcctcaaggatctagaactagaaataccatttgacccagcgatcctattactgggtatatacccaaaggattataaatcatgctactataaagacacatgcatatgtatgtttactgcagcactattcacaatagcaaagacttggaaccaacccaaatgtccatcaatgatagactggattaagaaaatatggcacatatacaccacggaatactatgcagccataaaaaaggtgagttcatgtcctttgcagggacatggatgaagctggaaaccatcattctcagcaaactatcacaaggacagaaaaccaaacaccgcatgttctcactcataggtgggaaytgaacaacgagaatgcttcgacacagggcgggaaacatcacacatcggggcctttcagggggtggggggtctgggggagggatagcattaggagaaatacctaatgtaaatgacaagtgtatgggtgcagcgaatcaacatggcacatgtatacatatgtaacaaacctgcacgttgtgcacatgtaccctagaacttaaagaataataataataaaaaaagaaaacctaaaaaaaaaaaaaggaaaagtcagggaaggctatttttcaaaaatattcatattgtacagttgattggataaagaaaatgtggtatatagacatcatggaatataccatgcaaccatacaaaagaatgaaaccatatcctttgcagcaacatggatggagctggaggctgttatcctaagtgaaacaactcagaaaatcaaatactgcatgggcgctaaacaatgggtacacatggacatcaagatgaaaataatagatactcaagacttcaaaattggggaggtcgctaggggtgtaagggatgaaaaatcgcctattgggtacaatgttcattatttggttgatgggttcactggaagcccaaacctgactattacgtaatatatgcaggtaacaaacctgtacatgtatcccctgaatctaaaataaaatttaaaatgtcaatgttgtaaaagacagagaaatgttccaggttaaaggaagctaaagagccatggcaaataaaaccaatacctgaccctagactggagtctatgctggggggcaaggatgtgcggcacacaaggatgttctacaggaaattattaggtcaaaactgacggaaatgtaatatggactgtagattaggtaaacgtattgcatccatggaaatatatgaaattgataactttactatggatatgaaccaatagtctcttatgtaaaagactattcctactccatatggatatctgatagatagatagatagatatgatatatacatgtatgtacgaggtatctacatcccctttgagaggaaaagcagacaccataattatgccaggacaataggtgcaaaccaggacagtcctgggcaaatcataccttgagtcactggtgtccttggctaggacagttttggtggcrtattgagtgcaaagcccagtgtgtgtgggttcaggaaagaatggaaggaggaaaagtgaaaacagtgcgtatgaacaactgtttcaagaaggtttcttaatggaaaaaaaaatgagagaagttggcagaggcaggaggcaaagtgaggtccagagacggagtttttaagatgggagaactaggagtgtgtgtgacagggaggaaatgaagtcaggagcattatggttattccagatctctacatgaatgccaaaggagagacagcrtccaactttgagtggctgaagaatctaaatcatgtcagctatggctgtttgaccttcaaatatgaaagggagtgtaactaccacttgctaatatctgttcaagagaatttagcaagaaaatttggaaagcacagtggaactattctcattatacccacagcagagttccaagacaggatatcaggtgcatcagagaaagacaccatgcwtgctgacttggtgtasgcaatggagagttctgccaggcaaattttgtgcatagccatgaggtataacctgggattggacatgaggaccaccgtctatgtcaacgccattgagaaagtgttyaaagtatacaatgaagccagagtgaccttcacgtagatggctcatgggtgacttccttgctaccctcttcacctgtaacttctgcagacctaccacaggtttacrtgttaccacagaaatccccttctctcttgactcattagataatggacactattcttaacaaatcgatccaaatcagctccctaagaagaaagtaattaaggttaggggatcatgtacactctgatgacggtgaaagtagaaatcactgacaccagagagagagacatgtaggtgtgttgcctctaaatgaaaagtctcttccatctggctgtgcagccttgctctgtggctcttcccaacacagtcagcaactgttgccagggaaggcacagtcaagagcaatcagatgcttacttctttgctctggacgagactgggaagtgctgtaacttttcacatattcagaaggtgacatgggggccgggcgcagtgactcacgcctgtaatcccagcactttgggaggccgaggcgggcggatcataaggtcaggagattgagaccatcctggctaacaaggtgaaaccccatctgtacttaaaaaacaaaaaattagccgggcgtgtggcgggtgcctgtagtcccagctactcggggaggctgaggcaggagaattcccagaacctgggaggcggagcttgcagtgagccgagatcgcgccactgcactccagcctgggcgacagagcaagactccgtctcaaaaaaaaaaaagaaggtggcatggtcctcacatgagttattgaagcaaaataactcaattttacaggatgcaaacaaaaataaaagctgtttctgcttattaattttattcttctggaaaaaaataagtaatgctgctgtaataaaattgcttttaatctcttaacaagcctaaccttgattcaagcagtgaatgcctacaaacataataaatttaaaaagctagtatttttatatcataaaacagtaccatttagagcttatcagccatgtattgttatccagcaaaaataagaagccctatggagaattaaattatcttcatacctacaaaaatgctggagggctatttctgtgaagacggtcggagtttgctgactataattatgacacatagtccaaagaatgcagtaacctccttatcatgttaacaaattgttctcttttgaaggtctatggttgactaattgaacaataattcaaatagaatgttccagaaaaaaaaaaaaaaagtgggttccctgtttggagattggctggccctgaacatcccttgctaatggcctctactcagcctgactttgtgtcctcttcttttagaggctttgcattctgcacccaggtgcacaaacagtgggttgaaaacaaccttgggttgaatgttttgtttgggaattatttggccaggtccttttgaacagtagtgtcccagtcaaatgctaaataataatatatgcaaaaatgagcttaaaaaaaacctgtaatgccctttcagaattctaactactttgtaactgcatgacttaacctggtaataaaagcagttattaaaagtctaccttacaaaaaaaatcttctcatctctgtaaatcaacagggatggaaaacaaacctatactgccacccaaaagacaaaagaatttagagtttagtaaaagcggcattttaaatggggaaaaggtacattattgaatgaatgatgtcagaacaattcagcacatgagaaataaagtgacaacactacaaattccagactgatcaaatatttaagttgaaaagcttatccaagaaagtactccaataaactacacaatagttttgttttacaacctcagaaaaggaaagtcctttctaagcataacaggaaaacctaaactataacaacattttgtggccaggtgcggtggctcacgcctgtaatcccagcactttgggaggctgaggctggtggatcatgaggtcaagagatcaagaacatcctggccaacatgctgaaaccctgtctctacgaaaaatacaaaaaaaattatctgggcgtagtggttcacgcctgtagtccctgctacttgggagactgaggcaggagaatggcttgaacggggaggcagaggatgcagtgagccgagatctcaccactgcacttcagcctggcgacagagtgagactccatctcaaaaaaaaaaagaacattaaaagaacattttgcatggcaaaaaccatcataagcagcaaagttgaaagacaaacgatacactggaaaacaatatttgtaactcttatctcagacaaaatgtaaactaacctaatatataaagagctcctaccaaccaattagaaaaaaacaacatcatagaaaattgggtaaagtataaggagacaattcacagagaacaaatcagatgaaaaattactcaatatcacccataataagagaatgcaaaataaaaataaaataaattatgttttgccttgttttatccatcaaattatcagtaacaaaaagaccggcagggtgtggtggctcacacctgtaatcccagcactttgggatgctgagaagggtggatctcttgaggtcaggagtttaagactagcctggacaacatggtggaaccccttctctactaaaaatacaaaattagccaggcacggtaatgcacacctgtaatcccagctactcaggaggctgaggcaggagaatcacttgaacccaggaggcgaaggttgcagtgagctgagatcgcaccattgcactccagcctgggcgacaagagtgaaactctgcctcaaaaaaaaaaaaaaaaaaaaaaaaaagactgataatatagtttgttggtatatgagaaaactgcactcttgcacattactcattgaaatgcaaattgattgaatttgtaattgtaattaaaatatttctttatattgcattttaaagcttgcttttttggctgggtgcagtggttcacatctgtaatcccaatactttgggaggccaaggcaggtggatcacttgaggtcaggagttcaaaactagcctggcccatatggtgaaaccccatctctactaaaaatacaaaaattagccaggtgttgtggtggtcgcctgtaatcccagctacttgggaggctgagacaggagagttgcttgaactggggcggcgaaggttgcagtgagccaagatcgtgccactgcactccagcctgggtgagagggtgagactccatctcaaaaaataaaaaaaaataaagctcgctttttaggtaatgtctcaatattcaagcatttggtttaccattgacccttgaataataacaggtttgagctgcaaggatccacttacacacagatttttcccccacctctgccacccctgagaccaacgcctcctcttcttgctcctcaattttcttaacattttttctctagcttactttattgtaataatctagtatataatacacataaaaatatgtgttaattgaccgttatattatcagtaaggcttcccgtcaaaagtaggctattactagttaagtttttggtgaaccaaaatctatacctgaatttttgactgcatggggggttggcatccctaacaccccactctgttcaagggtcaactgtatttatatttatatttaatttttttatgtaaagaaagggtctcactctgtcacccaggctggagcacagtggtgtgatcatggctcactgcagcctcaacttcctgggctcaagcgatcctcccatctcagcctcttgagtagctgggactatgggcatgaggcactatgcccagcctgtatttatattgcaaagtataaataaataggaaattttactaatttttccctagcggagtacacttaatgaattcttcaattttgaatcatcaccatcacttggcgagagcatacaactaatttcatgttcataaccttttgaatgagaaattgatctcttgaaaaatgaatttatactagccttagtggtctcacacaccagtgtgtcttatttttctcctattaggcctgccctctactcccctcaccatcacacacacataacagaaacctgaatcttcagatatctttaacccatcaatggccacgtcacatctccacaggaacctcactagattctccagatctcaccttagactctatccagaaatcaaggtggtgctttttgttgtttttttgttttttttattttgtctttggatcgttaggggtatcaagagcctttagctcaaagctggtcccagctggtccactagatgtcactgtcttgtaaattaatagtgctttacctacaaactccatccctgacatggcactgaagggacaccaggctagttccaaagagcaaagtattagtccgtgttacgcacacgtccactcttaggggagggacaggaagaggcaggctgtcagaagtctggcaggaagggagggctctgaacattgaaagaatgctggggatgggaatctgagttgatcatgcagtgtgtggtgaaatgtacctgaatgaagaagggagtgagacaggcgaagaccctgaacgaagagcatgccaggaagaggaacagcaggtgcaaagacccagaggctgagcgagccagagtccggtggggaggaggctaaaaagacaggcctcacggggacttgcagggcttggtaaagtgtgcccatttcattctgaatgaaatgggaaaacattggaagaatctgtgatttttggcttttcacggaaaagccctcaaaatctacctagatgtaatcatgaggaaacaccagacaaacccaaactgaggaactttcaatcaattttacaaattgataatttgtaaattatcaatgtcataaaagataaagagaggctgggaaaccatttgagagtagaggagattaaatgacaactagatgcaaactgtggctctcgactggattctggagggaaggaaaaacaatgctctgatgggcattatggggacagtggataatattcgaacatgaattatagattagataacataatgaaattaatattaaatttcctggctgggcacggtggctcacacctgtaatcccagctctttgggaagctgaggcaggcagatcacctgaggtcaggagttcaagaccagcctggtcaacatggtgaaaccccatctctactaaaaatacaaaaattagccaagtgtggtagcgggtgcctgtaataacagctactcgggaggctgaggcaggagaattgcctaaacctgggaggtggaggttgcagtgagccgagatcatgccattaaactccagcctgggcaaccaagagtgaaactctgtctcaaaaaaaaaaaaaaaattaaattaaatttcctgaagttgataactgtgctatggttatataagagaatatatcttatttttagaatacccacaatgaagttttaaaggggaaagtggatggtttgaggtttgaaaacactggtagatggcaggaaacctgcaaactgccatcctcagaagcggagtctgtaggttaagtatatgcatttgaccattcagccacccctacccccaaaggggaaaaggacctcagtaaggaggtcacaaatctaaaatcgtgatccttacagcactcatttttacagcatttctgttaatatttgtgctaatttttttcatccccaaagcagtttctgttgtttctgtatctctagaaaactttcaaaagaatattcaactatccacttgcaaagacttagatagctgcttcttatctcaggggatgacagtcaccctttgataatgtgatttttaaaaacctttgctcaaatacggtcacagtctcaaatttcctcacaactgaccttcccaaacagcactggctttcatgcaagaaaaccatccttaacatgtaatccttgtgcttaaaatgccaactcaaaaatgtgacaagagattaagctctgagtaaacagtgggaataaatcgcactagtttggagcacaca

SEQ ID NO: 93491 - DNA, 14993 bp, Homo sapiens
aaagcaatttctggccaggcatggtggctcacacctgtaatcccagcactttgggaggctgaggcgggaggatcgtttgaggccaggagttcaagaccagcccaggcaacataataagacaccacctctacaaaaaattagcggggcatggtggtacacacctgtggtcctaggtactccacctgcctcagcctcccaaagtgttgggattacaggcgtgagccactgcatccagctctaaaattcaaatttggaaagtcaactagaatcaagtatttacagaattatcttatttcctaatctgaacatgtggctgggtccagtggctcatgcctataatcccaacactttgggaggccaaggtgggcagattacctgagctcagtagttcaagaccagcctgggcaacatggcaaaccccatctataccaaaaaatacaaaaattagccgggtatggtggtgcaggcctgttatcccacctacttggggggctgaggcaggagaatcacttgaacttgtgaggtggaggctgcagtgagccaagatcgtatcactgcactccagcctggaaattggagcaagactctgcctcaaaaaaataaaaaaagtgtaaatacaccaggtgtggtagctcacacctgtaatcctaacactgggaggttgaggcaagaggatcatttgagcccaagagttcaagaccagtcagggcaacatagtaagaccccatctctattaaaaataaaaattaaaaacaaaaattaaaaacagaaaacaaaatacatgcacatgacaaaaagtaaaaatgatttgttagatttgaggagaaagaggtgatatagctttttttttttagagatgggaccttgctgtgttgcccaggctggagtgcagcggcacaatcatggctcactgcagtcccaaactcctgggctctagtgatcctcccatctcagcatccggagtaactgggactacaggcatgttccaccacatctagctaattttgtgtttaaatttttctgtagcgatacagtcttgctatgttgctcaggctagtctccaactcctggcctctagcgatcctcctgcctaaccttctgaagtgctggaatcaggcgtgacccactgtgcccagccctgatacagcatttcatagttaagatcctgagctctggaattggacagaccttcacttgaatcccagctgtgcctcgggcacattaattaacccagctgagcctcagcttctccttgtggaatatgaggctccactatgggagtcaaaggaaatgctgtgaagagtgaattccatggtgtaccacagttctcagcacatagtaaaggcttaataaatgttagccactctcatcatgctttcacggtttcaacactctattttttgtttgtttgtttgttttgagacggagtctcctactgtctcccaggatggagtgcagtggcgtgatctcagctcactgcaacctccgcctcccgggttcaagcaattctcttgcctcagcctctcgagtagctgggattacaggtgcccaccaccacgcccagctaattttttgtatttttttttagtagggatggggtttcaccatgttggccagactggtctcaaactcctgacttcgtgattcacccgccttggcctcccaaagtgctgggattacaggtgtgagccaccgcgcctggcctctaacgtctattattatgttgttatatcgacaaacatctgctagctcttttaagatcaaggcagcgtgtgaggtataaagacacggaaagcactaagctcttaacctcaaagagcttctcagctctacaactgccatcatctatcaactgaaccatgacaacagtctccaaaccagtctctctgcctccaggcttatcacttccaatccatgctccttccagccaaagggctctttccaaacgcaaagatatgatacgcaaaacatgatagttccatttctggacgccttccctactgcctgtaaaattaagtctacactctttaacacagtaaatataaggtctggtctccaccttccatagaagcctctttcatcacctgcctcctgccctcagaactcccccatgctaagcttcagctattcttaaatatttctagttccccagcctggcctgctctctctcagtatgggatctctgaacaagctgtccctgcccaggggccacgtccctattcttccacctggctgactccctgtagacttttagaacctcatcacctcctcctggaagccttctctgaccaacatctcccaaaacagggtaaaggcatctctgagctcattcctgtcctggcatggagctatcctggcaactattaatagaagagcaactatctgtcaatatgccttcttcactgtaaggtgaaaataggcactgtggcttgttcatcaccagatcctcatcagagagcatacaatctggcatatggtagatgcttagtgtttgctgtaaaaagaagttaatggcagccgggtgaggtggctcacgcctgtaatcccagcactttgggaggccaaggcaggcggattacctaaagtcgggagtttgagaccagaccagcctgaccaacatggagaaaccacgtctctactaaaaatacaaaattagccgggtgtggtggcgcatgcctgtaatcccagctacttgggaggctgaggcaagagaatcacttgaacccgggaggcggaggtcacagtaagctgagatcatgccactgcactctagcctgggcaacaagagcaaaactccatctccaaaaaaaaaaaaaaacaagaagttaatggaccaagtgcaacaagagctatgatccactccatgcttcagtcacagaagaactctatcccagccaaagtgcatttaaagtgctttgttatcactcaagtttggttttagaggagacgaatgactactccaatctctggcttacccagtaaaggactacaagccctttggccaacttgcatggagccatcacttgagtgaacaagattcacataagaaagcaacagaagaggttgagcccaattctggatactgattaggaaataatctgcaggcaacaaggattcatgaatggcttttgagtcaaagggtaacatggccatagctgtgctttttttttttttttttttttcagatagactcttgctctatcacccagtctggaatgcaatggcacaatctcaggtcactgcaacctccgcctcccgggttcaagcaattcttccacttcagcctcccgagtagctgggattacaggtgcctgccaccatgctcagctaatttttgtatttttgtaaagaaagggtttcaccacgtttgccagactggtcttgaactcctgacctcgtgatctgcccgccttggcctctcaaagtgctgggattacaggcgtgagccaccacaccaggcctagctgtgctttaataacatcactcgggaaacagaaggtagaccagagggtaaaaaacaaagagcaggtagggagctggatgagaaggaaggtcaaagggtccaggaatactatagtgataatgactgaaaatatgattacctgcgcacagccctgctacaggtgggaaaatggaggaacaataaagtaataccaatagcactttttattgctgtaatgctttgcaattcccaaagtgcttcatttataactgtgattctcaagcctagttacatctggagaggtttctaaaaataccaatttctcggctgggcacaatggctcacatctgtaatcccagcacttcgggaggccaaggcaggcagatcaactgaggtcaggagttcgagatcagcctggtcaaaatggcaaaacctcatctctactaaaaatacagaaattagccgggtttggtagcacgtgcctgtaatcccacctactggggtggctgaggcagaagaatcacttgaacctgggaggcagaggttacagtgagtcgagatggcaccactgaagtctagcctgggtgacagagcaagaccttgtctaggccttaacccaaatcaattaaatcagaatgtaaactccacaagggcagggattttggctgttttcctcactaccaatgcctggcacatgcgtggtgctcaggaagtatttgttgaatgaatgattgaatgaatgaatgaatataccattattaactgagatccaaggaacacaccaagctcctgatctcaggagcttagattttttttcacaataaggatacctttcctatttctaaagcactacttataaaaatatctcagaaaacatttagaagttaatcaatgtcctctgtgagtgagggggaaaaaaggtaggcagtgtctagtgatgtgacaagaagaaattagtggccacggacacagacaggcttaggcaagctctaactcctgtgaaattttgaggtaatcatattgtaaggactcaagcataatgagaaaacaactatatattaaccagctaccctaccctggatatttgaacaaaacccaaaaacccaaatgcatatacatacctattattttgttctgatacttcaggattactttgatatatgtgttctggctttgtacagagtaattctttgtttgatatctgaaaaacagtggcacatggaaatggatgaaacctgttgggacaaacatccaagggaccttttttttttttttttgagacagagtctcgccctgtcgcccaggctggagtgcaatggtgcgatctcggctcactgcaacaacctccgcctcccgggttcaaacgattatcctgcctcagcctcccgagtagctgggattacaggcatgagcctggccccaaggaactatttggataaggagaagccctgagtttggaaagaatcataaaagtagcatagaattgggccgggcacagcggctcacacctgtaatctcagcactttgggagaccaaggtgggcaaatcatgaggtcaggagtttgagaccagcctgcccaacgtagtgaaaccctgtctctattaaaaatacaaaaattagctgggagtggtagcgcacacctctaatcccagctactcagatggctgatgcaggagaatcccttgaacccagaaggcagagactgcagtgagctgacatcgcaccactgtactccagcctgggcaacacagtgagactgtctataaaaaaaaaaaaaaaaaaagtatccagccattgtcaaatatggtgggagggaaagggcaaaatcacccttgttttagaaccactaccctatccaatgactgttcattcacccatcactactcaaaactttctcttcctacttccagatattttcttgtggagaaaaaaagcctctcttcctctgatttatctggtaactctccagaaagtctaattgtgtagcacaagggtagagtgtacttaaaattgtgaaagtttttcctcatactattccaaaaaaagcaaagtttttatcttttcattggtatttgatgaaactaaaacgttttctccagatgttacgaacctcccagagagttaatccataaatatttaccttatctcccaccccaggcactgcaaattacagaaaagatctgacacccattttccagatctgttcaagaagtatctgttgggcatggtggctcacgcttataatcccatcactttgggaggccgaggtgggaagatcgcttgaggccaggagttcgagaccagccaggcctacatagtgaaaccctgtctctactaaaaacagaaaaaattagccgggcgtgggtggtgtacggctgtagtctcagctacttgggaggcagaggcaggagaatcacctgaacccaggaggtggaggttgcagtgagccgagattgcgccactgcactccagcctgggtgacagaacgagactgtgtctcagaaaaaaaaaaaaaaaaagtgactcgtatagttcttgtttttacaacccgaatatctgaattcaggtaaaatattctgcctgaccagggctacatgataagccacgtacttgatcactttgtagggtcgcagcacccttcttactactattttaggtaattcaggtttctgacggggaagccagtggagctgagcgggctgcaagaggggtgggttctggatgagaagttgggacgcgtgacgagggagtagagagtgaaccttggcttaaaaggaaggaaaataactgtgaagaaaagatgacccaacttgaaataaaacctgaagaccttatctcccacttgagagagagaagaagctgaaagccatcagcttgcactctgggctcacagacagagagggtgaggggttgagcccagatctatgacttcagacccctgtctcggcccctaggcctgatcattcattcaaactctcaataaacacggattaccagaccctgcgcagggaacacatctgggaaaacagctgcaacctcggataccagcacgggacaagctatctcagggcaatgrggaacaactaaagagaatcccaggaaccaggtaaccaatcgccagaagccctccgccctcatggtccattgggtcaaggccccactgccgcctcgtatcgccagcctccagtcctgcctccacgacgcgcccttccccaaggctggccgggtctggatgtcgccatcccctattcggagctacagacctcgcagctgaactcttaaaaagaacctcgcttcttcctcacggtgctccagctccacacaccgtactgagcctcgccagccaccgtacgcgaggtsgcggcgcgtccgtgacgtcactgatgtgcgcttctcccgcactaagggaaacatggctctarcgcggccggtgcggctcttttccctcgtgactcggttgctcctggcgccgcgacggggcctcacggtccgcagtcccgacgaacccctgccggtggtgcgcatcccagtggctctacagcggcagttggaacagcggcagagcaggcggcggaacctcccgaggccggtgctggttcgacccggaccgctgctggtttcggcgcggcggccggagttgaaccagccggcgcgcctcacactgggccgttgggagcgcgcgccgctagcctctcaaggctggaagagtcgacgcgcgcgtcgggaccacttctccatcgagcgcgcgcaacaggaggcgccagcggtgcgaaagctctcgtctaagggcagctttgctgacctgggcctggagccccgtgtgctgcacgcactacaggaggctgcgcctgaagtcgttcagcccacaaccgtgcagtctagcaccatcccctcactacttcgcggccgccatgtcgtttgcgccgcagaaaccggcagtggcaagactctcagctacctcctgccgctgcttcaacggctcttgggccagccaagcctggactcccttcctatccccgcgccccgaggcctggtccttgttccttcccgagaattggcccaacaggtgcgggctgtggcccaacccttgggccgctccttgggcctgctggtgcggsacctggagggaggccacggcatgcgtaggatcaggctgcagctgtccagacagccttcagcagatgtgcttgtggccactccaggggctctgtggaaggccctgaaaagtcgactgatcagtcyggagcaactctccttcttggtgttggatgaggcagacacactgctggatgaaagcttcctggaactggtggactacatcttagagaagagccacatagcagaaggcccagctgacttggaagaccccttcaatcccaaagctcagttagtgctggtaggagccacatttcccgaaggtgtaggccagttgctgaataaagtcgccagcccagatgctgtcaccaccatcaccagctccaagctccactgtatcatgcctcatgtgaaacagacatttctgagactgaagggagcagataaggtggccgagctggtgcacatcctcaagcatcgtgacagagcagaaaggactggtccctcaggaactgttctggtgttctgtaatagctccagcactgtgaactggctgggatatattctggatgaccacaaaatccaacacctaaggttgcaggggcaaatgccagccttgatgagggtaggaatcttccagtccttccagaagagctcccgagacatacttctctgcacagacatagcctctcggggcctggacagcactggtgtggagctggttgtcaattatgatttccccccaacgctgcaagattacatccacagagcagggagagtgggccgtgtggggagcgaggtgccaggcaccgtcatcagttttgtgacccatccctgggatgtgagcctggttcagaagattgagctggcggctcgccgaaggagaagtcttccargactagcatcctcggtgaaagagcctttgccscaagcaacctgattttgacaaatctgattaaaatgtgatgctagaacagggatctttcccagtatcttgagtgggtgaccacacttgtcagtgggaggctctgggctgccctgtcgrctccttgagggcgggatgaactgctttgtgacttggaaaggtacgctgctggccagcattggagaagaagctgctgagcatggctttctgtagtctttagcaagacacaagtggattttgactttgtatcatgtcatgatttctaacaataaatgatgtttttatgtgcctcccctaagaataattagcaccggggcggaattcagtagtttctgaggattcatacaccaaacctccacatctaggacaaaggctctttcagttgatgttttcatttataaacatttagtttgtatttcctgcccccaaaaaggtatccattaagcccccagggaaaggaaaggaaaggaaatgtgactagcagtagacagagttactctctaacaatgcccaagacaaacgggcgtcttggcgaaatctctggaaggtactggcagaaaagtaaagggtagacgaacacagaagttttgcttgtacattttcaggttctgccttctatcccaactcggtagccgagaaagaggagagatgattaaacggttttacaaaactggaaaaataaccatatagcattttctttatatatatatatacgtatatatatatatatatatatatatatacatacgtatatatatatatatacatacatatatatacgtatatatatatatgtatatatatatatacgtgtatatatatatacgtgtatatatatatgtgtatatatatatatacacaaaaaaaaattacaaaaatcaacccggcgtggtggcacgcgcctgtagtcccagctactcgggaggctgaggcaggagaatcacttgaacctgggaggcggaggttgcagtgagccaagatcataccactacactccagcctaggggacagagcaagactccatctcaaaaaaaaaaaaaaaaaaaagccgggtgtggtggctcacgcctgtaatgccagcactttgggaggctgaggcaggaggatcacctgaggtcaggagtttaagaccagcctggtaaacatgcgaaaccccatctctattaaaaatacaaaaaaattagctgaatgtggtggtgcacgcctgtaatcccaaatacttgggaggctgaggcacaagaatggcttgaattctggaggcgaaggtttcagtgagccaaaattgcacttctgcactccagcctgggtgacagagctgatattctgtctcaaaaaaaataacagaatcctgagccccactccagatgggattaagctctctaaagtttgacctgagaatactctttgtaaactcccccaggtgatacttgggccctcccaaattgataaaccatttgtctatgctgtactgcctttcccagagtcccagcaaattcctgtaaggctttgtacccccacaagacaagagggatgcttccggacaagtactctctccagagccttggagaatctgagtgatctcatgctagccctcctgccagaacagacttcccaggaaccatccccttgatattttacctcctaccactccctgcaggccatcaattagcaccacactaaagcaacttatgagagaaggtgctatgattctcaaccggggtgacccagtctccaaagatcgggccgtctctacctcctgggcatatcccctctgcaataaccccactaaataaatgtcccatgtttgctttttcaaggccagtaatagggagacctctccttaaggtcatctctctttggtaggaagttcttggccacactgaaccaaaggctgctcctagtgtggtcctgatcaggctaagggcagagttgcctgtttcctttgagtaggaccaaatcgcctttttttaaatataaaaaaaatagacacaaggtctagctatgttacccacgctggtctcaaattcctgggctcaagagatactcctgcctccacctcgcaaagtgctaggattacaggtgtgagccgccacgcctggccctaatgaccttttggtacctctccacagtgctgacctgggctgctgctgggagctaaacctcatcctttcatagtgataagattgtcattgtttgcctatttaaagagagggcagtgtaatgataaggttatgattttgtattgttatctttttttttttttttgaaacagagtcttaactctgtcacccaggctggagtgcagtggcacaatctcggctcactgcaacctctgcctcccaagttcaagcaattctcgggcctcagcctcctgagtagctgggattagaggtgcacaccaccatgcccggctagtttttatatttttagtagagacagagttttgccatgttggccaggctggttgtgaactcctggcctcaagtgacccgcctgcctcagcctcccaaagtgctgggattacagacatgagccaaggcacctggccagtcatttgggattcttatcttgtcatgaatttgtttgaatttcatgttaaaataggttcatctgtagacgtgacatctcactcctataatctcagcactttgggaggccaaggcaagaggatcacttgaggccaggagttccaggttacagtaagctatgatggtgccactgtattctagcctggatgacaaagtgagaccctgtttctgaaaaaagaataaattttaaaaatagaaccatcattcgcacttcatacagtcatttgggagcctcattttgccttggggcacatttaacatacctccagtgtacatcacctttaaatgtgatgagcttgtcctcacattcttaacagctataattctggagccccaaatgaagccctgcggatcagaatgcctctctgctacctgtatgaccttggatggacccctaacctcttggcgttcttgaatcttaggtggtaaaaatgtgagggtgctatgaatttacatttggggcagaacaaagtcaagaagagcctgtatgttttcagtcttcttaactggaacgtattccctctcctattgaaaccgccattgcaaaattacaaccgagagagtgaaagagatttgacctaaccagctccatcgtgcttctaacctccaagctgtccttgttcattcctgggcataggctgaactaactttgggaggaacttagtttatagtttatagtttaaaacaaagaagataacagccctttcccaaaagaaacccccttcatgcctggggactagactgcctttgtaggactaacaaaatcagccaaaagattagaaattatggtttaggagtcatgcagctagaggctacaagattctttttttttttttgagatggagtctcactgttgttgcccaggctggagtgcggaggcgctatcttgactcactgcaacctccgcctcccgggttcaagcaattctcctgcctcagcctcctgagtagctgggattacaggcacccaccaccacgcccagctaattttttgtatttttagtagagacgagtttcaccatgttacccaggctggtcttgaactcttgacctcaggtgatccacccacctcagcctcccaaagtgctgggattacaggcgtgagccactgtgcccggccgaggctacaagattctgaccagtccccaaattgctcttggggataacatcactatataaaacctaagatcatgctcgcttcagcaacacatatactaaaattggaactatacagagaagatgagcacagccccttgtgcaaggatgacatgcaaatccatgaagcgttccatatttgttaattttttaattttttttaaattatatacctaggccgggtatggtggctcatgcctgtaatctcagaactttgggaggccgaggcatctgtctcaaaatatatatatatgtgtgtgtgtgtgtgtgtgtgtgtgtgtgtacatatatacatacatacgtgtcatatatatgttatatattatatatatgacatagtatcagtgcttgagatattttgcacaccctacacttgattggctgggcgcagtggctcacgcctgtaatcccaacactttggaaggccaaggcaggcggatcccttgaggacgggggagtttgagagcagactggccaacatggcaaaaccctgtctctactaaaaatacaaaaattagctgggcgtggtggcaggtgcctgtagtcccagcttctcaggaggctgagacacgagaatcccttgaaggggaggttgcggtgagtcaagatcattgcaccactgtactccagcctgggcaacagagtgagactctgtctcaaaaaacataaataaaataaaaaagaccttgcacttgatggatcagctgacaccacccagattaatcttgtggctcccccacccaggaactgactcggcaagaggatactttcgactacctaagatttcttttttttttcctttgagatggagtctcactctgtcgcctaggctggagtgcagtggcatgatcttggctcactgcaatctctgcctcctgggtttcagtgcttcagcctcccaggtagctagctggggttacagacagcgccaccacgcccggctaactttttgtttttgttgttgtttttgagacagagtctcgctctgtcactaggctggaatgcaatggctggatctcagctcactgcaacccacacctcccagattcaggattcttctgcctcagcctcccaagtagctgggactacaggcacatgccaccacacccagctaaattgtatttttagtagagacagggtttcaccatattggccaggatggtctcgatctcttgacctcgtgatccgcccaccttggcctccgaaagtgctgggattacaggcatgagccaccgcgtccagcctaatttttgtttttttaggggtttcaccatgttggccaggctggtcagcctcccagagtgctgggattacaagcacgagctgccacgcccaagctgactccctatgatttcatctctgacccaaccaatcagctttccggactcactgcccaccacccaccaaattatctttaaaaactctgatccctgaatgcttagggagactgatttgagtaataaaactccagtctcccgcacagctagctctgcgtgaattactctttattgcaatttccctgtcttgataaatcagctttgtctaggcagtggcaaggggaacacgttgggcagttactctttgcgtgtgtccagatctcaccagtccttcaagtccagctcgaaggagccttccatgatccctttgtccatcccaatctctgcctctcctgctgttgattgcttagcaccagtgcgtggctacctatctatctcttagattaatcttgcctctccagctcatatcagaatttaggtttctcttgccctcctgtggtcactggggcttgtaccagccgacagatgtgccccacagagtggctactaggcatttgtagggagggctggatgggagggcccaggcaggattcctctctatctctgccctgctctcctccacaaaaccctgaaggcctgaagcctgccccttaagtcacagattccttaggtgacttcacagggtagtgatgacctcacaagcttccaaagtttccatggcagcgtgactacacacctgcgtcctagagaagcctccctaccatttctctgtaagataccaatctgtttggttggctgagagagaatgactgaccggatcctctatattgtctctaacatgtcctctgtcccctgggagggcagcgcagcaggtaggcatacagggggcatctatacaggaggcgttgctgtacccacagcttcacctggctgacacattccttctgggctggcccaccacacctcgagctttcccagccataagtaatatcgagggcgtggccactcagggacccacagtgttcctgctcagggcaagttcacctgctaagggcaagtgaaatgtcatctgagcaggtgctcagaaaggttctcatcttttttttttttttttttttttaattgagatggggtcttgctatgttgctggggctggtctgaattttttttttttttttttttttttttgagacaggttctctgtcgtccaggttggagcacactggcataatcacagctcactgaaacctcaacttcctgggctcaggggattctcccaactcgtctccctagtagctgggactacaggcacgcgccaccacacccagctaattttttctctttttagtagtgacagggtttcgccatgttgcctaggctggtcttgaactcctgagctcaagcgatcggcccacctcagcctcccaaagtgctaggattacgggcgtgaggcactgtgcctggcccaccaatttgtattagatctttttattttagtctcgctctgtcac

SEQ ID NO: 93492 - DNA, 51910 bp, Homo sapiens
atgtaaagacatatcaggaaatgaagatctaagattagatataattttatctctgaaacttttcaaatgataaaatccatccaatatgttttcataaatttgatccagagcccattttttgacacaatatttggtctatatggtagaatgtgttgtttggatgcctaccaaagtattgaaattcctttgacaggagaaactgcagatttctacattcaattctcacccaaaacctaagatgaaaaaaaactccaacataaaagaaagagtttatccaacaaaaaaatacagaataaactttcaaccatagaaaagagtgatgacctgggatttaactgcagatgggatgtcttccttcacagcataagcttgtgtggaagtgaatgacagcatctgaaacctagaaggtatctttttgattatatcagtcattttattttttgtaggaatgaaagtttgaaattcagaccaaacattccaggtaactctcattcactcaaaaaaacttttattcttctaataatatgagaaatattctttttatggaatgttttaaaaatacacataatacaatttttaaataagtttaaataaattttaaaaggagccacaattaatattttggtatacagttttctaaatattcttctgtgcattagagaaaaatataaatatatatatattttatttttacaaaaatatatgcttactgaaactatatgtcaataaatatatttctacaacaccactttgattacctatgtgatattactttgaatgtacaaatcataatttattatattggtcatttttagatacttatttttgttcccaatacattgctaaaatttatcttactgttatttaagttgcaatgtgactagtcttgacacacatccctaattattttcttaaaatacattcctagaaataggattactgattgaaaggatatacacatttctaaggcttttcacctcttttgccaagttaatctccatttattcagtmagcaaatatacattgattgcctattatctgtttgcttctatacctaagtctgagttacagttgggggacaacataaatacagtccttgcctttatagagtttacaatataggtagagagagagagacaataagcaaatacccaatattcatgacagtaataaatcatgagcaaaaccaacagaataccatgagaaaatataatacagtgacttcacttaggcagagctcgaggaggaatgccaaggaagttccactgggacactgaagctaagaccaggaggtgaagagtggcaggacaagcattctgagagagggactagcaatgtctgctggccccacaagaagagctccacaaaggaactgaaagaagccacgggtctgaagttcagtgacagagaagatgggagcttggcaggggccacactaactgcaatgaaagctatcactgaagggttttaagcagaggaatcatgtggtctgactaataatgttttttaatgattccttctggcagctctaagcaaggtaagtaacaacactatttagattaattcagcagtctaaaaagtcaacaacaaaaattttgtcccattcagtaggttgcctgttcactctgatgatagtttcctttgctgtgcagaagctctttagtttaattagatcccatttgtcaattctggcttttgttgctattgcttttggtgttttagtcatgaagtctttgcccaggcctatgtcctgaatggtactatctaggttttcttctagggtttttatggttttatggttttatggtcttatgtttacatctttaatccatctgacaaagagttaatatccagaatctacaaagaatttaaacaaatttacaagaaaaaaacaaccccaccaaaaagtgggcaaaggatatgaacagacacttctcaaaagaagacatttatgcggccaacaaacatgtaaaaaaagctcatcatcactggtcattagagaaatgcaaatcaaaaccacgatgaaataccatctcacatcagttagaatggtgagcattaaaaagttgggaaacaacagatgctggaaaggatgtggagaaataggaatccttttacactgttggtgggagtgtaaattagttcaaccattgtggaagacagtgtggcaattcctcaaggatctagaaccagaaataccatttgacccagcaattccattactgggtatatacccaaagggttataaatcattctactataaagatacatgcacacgtatgtttattgcagcactgttcacaatagcaaagacttggaaccaacacaaatgcccatcaatgatagactggattaagaaaatgtggcacatatacaccatggaatactatgcagccaaaaaaaggatgagttcatgtcctttgcagggacatgtatgaagctggaaaccatcattctcagcaaactaacacaagaacagaaaaccaaacaccgtgtgttctcactcataagcaggagttgaacaatgagaacacatgaacacagggaggggaacatcacacactggggcttgtcagggggtggggggataggggagggatagcattaggagaaatacctaatgtagatgatgcgttgatgggtgcagcaaaccaccatggcacatatatacccatgtaacaagcctgcacgttctgtacatgtatcccagaacttaaagtataataataaaaaaaaaagtaaacggcaatgacaatgatgtcttagaaggaagcaatggcagaagacgtggagagaagtggaattacttaagatatatttggagatcatatcaacagctactggtggttcaagcccagaagagggcctggttgtcctaaactcacaacactgtattttttcctaattaaaataataaatataataagataaaaatagcatttcaatgttgtgctcattttgcattgctttgattactagcccttgaacattgtttatttatgagcaatttgcatttttttgtgcactacctatgattgggttttttgccccctttgctactagatcattctttttcttgttgcttatgtatcagtttcctagggctgctgtaacaaaataccacaaactaggtggcttaaaacagcagaaatatattctctcactgttctagagacagcaagtgcaaaatcaaagcattggcagtgccatactcctgctgaggtctctagggaggttccttccttgcctcttccagcttctggcagccccaggtgttccacagcctgtggctgttatcagtcgaatctctgcttccatccacacatgaggttctccctgtatgtccatgtctcctcctcttatgacaccagtcatattggattaagagccctccctactccgcagcttaactaattatttctgcaatgactctatttccaaataaggtcccattctgaggtactgggggttaggactgtaacgtatcttttgacagacccaactcaaaccataacaactcataagagatcttaatacactgcaaatatctttctcagtttatcatttgcctttgtatcctgtttatgttgtttggtatggataaaaggttttaattttgtcaatttaatctatcagtttttcttttatccagtatttgttgagtgcctactctgtgtgtgtgtgtatctgtgcatgtgtgtgtgtgtgtaccagatgctgttctaggtgcccttgatccaaagatgaatgagagttggctgtcttatccctacatgctcagagtctaggaggcagacaagtaaacaaataaatatcattcagatgatgactacaacaataaaacatttgaactaggggaagggggcaaaaataaagaatgctcagcgaagtttgggcagttgtagagaggagatcagtcatgccagacccctctcaactccaatagggaatgcaccagcttcaagagcccgaacaagagacccagagccagcaaagcagacatggggtttgttgagagaaacttacttacatacagggatggtccagtgacagtgggctacacagaactgctctgcccagtggcagcagacagggcaggagagccgcttgtaagaagcatgcagtcgaaacagcgttttcacttagcaccgtcctcctaacaacctccaactggtaaccttcatttaacctaaaacacagggctttgatctcctgtacagcctgtgttccttgggatgggcgaggggctcagatattcctcatagataaggaatgaatctccaggttggcaacttctggattccttagctcggaactccaaatacacgtttgtgtgcatctgccatgcagggtcattctcagggtatgctgaagtcaggttatcactgtcaggtgcgtctaccaaacacaggtgtgtctaccattcaaggcccttgggcagtcgttaaggaatatgaagtttcagtaattatgcctcaaactgaaagtttcctggctgactgtccatcaagtagggtctcctcaaagtgcagtccagcggaccacagcgtcagcctcacctgaaaccttgttagaatgcagaatctcaggccctgccttagacctagggaattaaaacctgcatttacatgacatccctggatgatgtgtatacacatgaaagtctgagaagcactgccctatgctttggaagtcattttttcagatttacagtcacaggcttttgtctgtgattacaaggacataattagaaaataccctagaagccttgcagtgcaaaagcaaactttaaaactcttcccatgtgttatgtcaagatactgattagtacatcaaatgggcagccttcaccaaatagcttcataatccatgggaaaagagacccagtgtgcacatttcagggtaagctcagtggaagccaaggggacaatttgctctagggatgaccctggcatgaccctgtgattcagaccgaagataagcctccaaatccattccctggatcagctgttcaaaggggatttgtctcctgggttataattggtctcccgcttgtattttgagcaggtggttcaggggaaagggaaactttgttttatttatttaagcagttgaataaaggaagtgtctctttgggaaaagagataggaattgtttctggcgtggtaattgggtagagtaagctggaagaggtgggggtacaagagaaagtgatggagagagaaatggaaaacaagacttgggtggagaagaaaactctcaccaaagtagaacagctgctggatcactcaaaaacccgtattgttttacttcagagccaagttcaattctgcatgctgaaaggaaggaatgcaaggtacacacaaggtggatagctagggacaaaaatgtgagacaccgtagcctctagatgtaagatattccttaggaaacatggcaacatggatgaagccagcctcctggcaccctgcagagtgtgcactacaagccggcagtctcatccttggttcactcagtcgtgggttttactagaacaaggctaggatccattttaatgtatgctaaaagatataagagaggcattcaatgcaaatattaacctggactagtgtttaatgcctgtctccaatgcattcttcccaccaaaaatctggcggtggttttagagggaacttactggaatcattttaactcagcaaataaataaaaagacttgctgcctgcagtttattgtgacggtccgggcttccctgtacagtgagacagacgtgcactgttcaaccctaggcactctttagagctgtgtgctacacaatccataaaagcaaacacggctgccctggggacagaaaaaaataaaaacaaaggggattaagacaaggtacctacagtcaagaatttaccacttaatataaaaataagtagctaaaacatacatctagcagaaactctcaaatttctatgaccggctttgcagaggctactgccgccaggagtcccagtactatcagccatggtcaaccacaccatgttcttcgacgttgctgtcgacagtgagcccttggaccacgtctcctttgagctgtttgcagaaaagkttccaaagacagcagaaaacgttcgtgctctgagcactgaagagaaaggatttggttataagggtccctgctttcacagaattataccagcatttatgtgtcagggtggtgacttcacgcaccataatggcactggtggcaagtccatctacggggagaaatttgaagatgagaaatttatcctaaagcgtacaggtcctggcatcttgtccatggcaaattctggwcccaacacaaactgttccgtttttcatctgcactgccaagacggggtggttggatggcaagcatgtagtctttggcaaggtgaaagaaggcatgaatattttggaggccatagagcaatttgggtccaggaatggcaagaccagcaagaagaccaccattgctgactgtggacagctctggtaagtttgacttgtgttttgtcttaaccactggaccattccttctgtagctcaggagagcaccccttttgcttgcagtatcctagaatctttgtgcttccactgcaattccctttgggttccatgttttcttcgttcccttccatgcctagctggattgcagagttaagtttatgattatgaaataaaaactaaataacaattgtctgtccttgtttgagttagggctttgatgtaggccttacttgaagcagaaacaggttacttctgaaacgttacttacatgcttgcttaattctacacagtactcagttttttttttcactttccagacccaggaagtctcaatgttatttgttgagtggaatattgaaaatgtaggcaggggctgtccatggtggctcactgcctgtaatcccaaagctttgggaacctgaggcagaagatcacttgaggtcaggagtcaacatcagcctgggcaacatagtgaaaccctgtctctacaaaaaataattagcccggcctggtggtgcatgctataggcctagctaatcaggaggctgacctgggaggattgcttgagcccaggagttaaggctgcagtgagctatgatcatgccactgcactccagcctgggtggcagagtgagactctgtctcttaaaggtaggcaggggcaggaaaagcaaggagccagaaattagaggttggaccagtgctcaatgagttcwtgcatttagaggtgttcttcaaggtgactagtgtcacaaactgagaaatctgttatggctcattttctgtaacaaacctaacttgaacactgctggtattccttgagggaaggctattgggctttaggctctatggggaagggtcttgggccctttgagtaatttgagttggaggacgtaggtcaagtttatatatcttttaattatggtggaattcctatgtagagactgaaaagccaggtacctggtgctgtagtcagtctccctgtagagggttaaggcccagaccacatgcagtgactagttactgcttctagcatatagagcctctccctagctttgattatggaaactttgaggtcttgccagcctgatgaatctgagccataagatctggtcaaagcgattcccttcccttaattgaggacttggtttctcatgaaattaaatgtacagtgctggcaattagatgtataggctgaaatatacatatcagaggacaatctaagctgagaaaaccccaccactgcccaccttaactgacctctaaggttcttaacccagcaatcaagtttgcctatcctgaagatgtgagaattgatcacttggtgtgttctgcaaatttttgttttactgtctgcctggttccttctgcgtgaattaccgatgcaaccccctctacaaccaccaccacttgttcatctcagtcttgtgtgttgtctggttacatatccctgggtgacatcattcaatgtcttaatgtactttagctcaggcctgagcacaacatggaaataaatatcctttcattatcaaaaatttttttaatgtctatgacctctgaaaatgaaaaccagaaacgttaaaatccatttatcttcatataacatgcataaaagttatttggggattcctggaccaytttcaaatatgattttagttggatatttcacaatcctgttatttttgaattgcctgttggcttaaaatttatcacctagatctttatgactgttttagctttcttgtgaataaatgagattggctgttgggaggaccaaaaaaccacatgcatatacatagttaatggaacaatacacaggtagcagccatctgacaattacattatttgatctttttaaaaaggaaaaagcttactttgtttttgtatatctttttctaattcagtctaatgatgaccagtttaaatttctaggctacaggcatacaaattttgaaacaacaaatgttaggactttgaaagttcattatgatcataaacttatttttaaaactttttattcttaaaaacattttattctgaaatattttttcttaaatatctttattcttaaaatatcatatgtccctacctcataccrtatgcaaagrttaacacaacatggatcatagatctacatataagaattaaaactatacaactttcctagaaaaaaacataggcataaatctttataacmctggattagcaatagtttcttagatgtgatcccaaaagcacaaacaacaaaagaaaaaaattaattagwctttattaaaattaaaacatttgtgcttcaaaaaacatcatcaagaaaataaaaagacaactcacagaatgagagaaaatattatgaatcatatgtttgataaggtacttgtctccagaatatattaagaattcttaaaactcaacaatgaaaggacaaataactcaactaaaaaacgggcaaagaatttgaatagacattcctccaaagaagatacacaatttggccaataagcacatgaaaagatgctcaacatcattagtcattagggaaatgcaaatcaaaactatggtgaaatttcatatacattaggatggctataatcaaaaaggtggacaataacaaatctcagtaaagatatgaaaaactggaatgctcatgcattgctagtgagattgtgaaatagtacactgcttgggaaaacaggctggcagtttctcagaaaagttcctcaaaagattaaacgtagttyccaaatgacccattccagtcctaggtatattcccaagagaatygaaaacatatttccacacaaaaaaacttgtatgcaaatgtccacagcagcattatttatgatggctaagacgtgaaaacaatgtgcatgtctaccaactgatgaatggataaacaaaatgtaacatacccatataraagaatattaattgaagttttgatacacgctacaacgtggatgaaacttgtagacattgtgttaaacgtaagaaatcagacacaaagagctacatattacatgattccatttccataagatgtccagaataggcaaatctatggagacgcaaaacagaatgagtgactgccagagactacagagatgtgagaaggaaaaatcactgctgacaggtaccttttygaggtgatgaaaattttctgtaattaagtagtgatgacaattcaacgtgtgaacatattttttaaaacccactgaattatgtactttaaaagaatgaattttatgttagaggagtaatattttaataaagcggttattttttaaaactatgtatatgtttcagaaaaagaaaaaccagaatgagaaaaatttactccaattctaacactacagaatccctgcaaaatttattttctataagaaatagttttcttttataaaaatgaaacaactgaagagactgtgtaatttgtcaatttatagtataaaaatgatccgataactccacaaaccactcaaatgaactgtacatggaaatgttgcatccagcagaccctgagggtccttgccccagacttcagtacacattaaaatgaagattcctagcccaggtgcagtggctcacgcctgtaatccagcactttcggaggctgaggcgggcggatcacaaagtcaagagatcgagaccatcctggccaacatgatgaaaccccgtctctactaaaaatacaaaaattagctgggcttggtggcacacacctgtagtcccagctactggggaggctgaggcaggagaatcgcttaaactcgggaggtggaggctgcagtgagccgagatcacgtcactgcattccagtctggtgacagagcgagattccgtctcaaaaaaaaaaaaaaraagaagcttccccaaaaatgcacttacacactggaagatcaaggagtaaagagtcatgatgtctacaatttattctcatattcttcagcaataacaacaatattaataaatatcagtatttatatagagagaaaataaatatagcagtagtaactagtgaatctgggttgtggatatacagcaatttattacattattcctgcagactttctctaaatttgagttttgcttttaagataagaagtgcaaaaagtaataaggtgattatatacagtgactctcatttggaggagcctaaagcagggtctctcgaatttactatatgtatccacctgttacctgagaaattaagtggggaggtggcaaggggcagtaaaaggagcgtccacaccaatatcatcttcccattcctggtttctgatgtgagtttcttggtgatcagtgstatttgaagaagaaaacgtatcctaccctaactagtaacttagaaggggcccagtcctcactctccatcaattaaggcaccaatctggagtgctgtcatatgcgctcacattctagtttcttctcttgttcctttattccaaaattatgttttaaacagttaatctaagttataaaaaatttattcctatatacataagagaataactgaaaggatacccactaaactggcaggggaggaggggtgaagagaggtgaaaaagggatttctactttttacttcaagtatttacacattctgtgttgtttttatgtgcttcaatactcatcatgaacatggactagttttataatatttttgaacctgattctctggcaaattgttttataatttttttwaaaaaatgactgctcaagtgggatggaattgtacaatctctattaatttactttcaaatatttcaacaaagggaaatattaactaaatgtggccaaatcttggtaattattgaatctggatgatggacatatggccatattgtactctctatgtatattttaactttttataatgaatattatttaaaggaccattgtaaaagaaatgtttaaaagcaggagaattaagggaataaaagttgaattcatccacaaaattatatgagcaataattttggttttttttgttgagacagggtctttckctgttgcccaggctggagtgcagtggcwcaatcacagctcactgcaggctcaacttcctaggctcaagggatcctcccacttcagcctcccaagtagctgggactataggtgtgcaccatcacacctggctaatttttaaatttttggtagaaatggggtctcactatgttgcccaggctggtctcaaactcctgggctcaagcaatcctcytgtcttggcctcccaaagggctgggattatggcatgagccaccatgcccagcattgctgtctatttttgaaaagcatttaagggtattagaaaatgcttattctgtaccaagcgttgccaaactttctgtaaagggccagacagtaaatattttaggctttatagtgctatagtgatatggtctggctgtgtccccacccaaatctcttcttcaattgtaatccaaattgtaatccccacatgttgggggagggacttcatgggaggtgactgaatcatgggggtggttcccccatgctgttctcctgatagtgagttctcacaagatctgacggttttgtgaggggctttgctctttacccactttgcttcattcttctgtctcctgccaccttgtgaagaagaacatgtttgcccccccttccaccatgattgtaagtttcctgaagcctcccagccctgtggaactgtgagtcaattaaacttctttcctttataaattactcagtctcaggtatgtccttatagcagtgtgagaatggactaatacatatagtctctgccacaactacttaattctaccactgtgctgcaaaaacagccacagaaatatatataaatgaatatacatgtgttccaataaaactttattgacaggaactgaaatttgaattttatgtaattttcacatgtcaggaaatgttattcttttttttcaaccatttaaaaatgtgaaaccattcttagcttacaggcaatacaggcccacagaatgtggactggatttggtccacaagccatattttgccagtctctgctcccatctgaaaacatgtatcatatatacaatgcaaaactgtatatttcatttttctctgtcaaaaaatatgaagaggagttaaacccttaaatagtaactatctctgggtgatggggttatagatgacttttattgtctacattatatttttcaacattttccaaatatcttaaaataaatatatttctgataaataatgttttttaaaagaatcctttcactatcttcaaaaagagacaggaagacaaaacatggagattaggagattgcccatctgtcttgaatgtcttctggagtccagattggattaaataacttctgaggatttccttcctgttctgtgattctgtctcctcacacaatcaaatgcctgtaacataattctctttaatttggaaagcaatcctctctctcgcttctctctgaaagtaaatttccgaaattaagtccgtaggctgagggaccccctttgccatctgggcaaatgtaattagcaacccgtctggtgttcagggaaccargcagccgcgctcttctcaaaccagcctggaaatgcaaaacgcagtagcattaaacacgcactcccccagaggaaggaggaaggccacaagggggcagagaatctgcaacccaaaggaaaagcaggtttcgccccaaatagaacatactcttttgtaaattgcccaattatctaaatgtctttcagaaacsaaattaagaatgctataaagacttcaatttgttcacataaaatggtgattcacaaaattgagcatgcctttttcttggagcctagataactagggtctttcaaaaaggtcgaagcaaattgtgttttttgttttttgtttttctctatggtaaaggatcaggaaaatttatacatttttcttttcagatggagtttttttttttttctagctcacaagcaaccattgctttacaaacatagtctgttttattttttcctatatagcaaaacacaaccaaatcaaatttgaagggggaaattcctgtttattataaytccctcataaaagatccaggaatcaaatagaaaagtataagggatatggacaaaggaatctccactaaatctgtttaatcatataagtcactctaataaaatagctaacattgtctcctaattcacacatttaaaagtaaagatttaacttttgccttttccaagtaacagataatgaagaaaaacaaataataattgtacctaccacttattcagcactaactgctcaagaaaatacttttcatgcactttttaataatcaccactaccccaggwgtagataatattattastccatttatttaaatgcaaaaattcatcggcccatctctcacctggacattcctaactcagacctattcatatgcacaccctgctctcttcaattttcccactaaaaaagaaggaatctatgcaarcattcttagattaataaacataattcttcataaatatgaacagacaacctaggttcacaagaacaaaacactcttggcyttatttctacctcgatttttcacctttccttcacagaaaaactcctcaaaagattctatactttctgtctccagtttctgtttctcatttctttaactttttaaatttctaattatgataaatacacataacataaaacgtaccatctttttagtgtacaattcagtagtgtcaagtatactcacattattttgcagccaatctccagagctttttcttcttgcaaaactgaaactcttacacccattaaacaactcctcattccaacattgtactttccatctctatgaatttgactgctcgaggtacctcatatgagtggaatcttaccatatttataattttgtgactggcttattttacttaggataatgtcctcaagttctatctatgttgtagaatgtgtcagaatttccttcctttttaaggctgaatagtgtttcattgtacgtatatgccacattttgcatagccattcactcattgatagacattcacgttctttctagtttttgactattatgaataatgctgccagaaacaygggtgtacctcattctgtyttgaatccactctgatcaggttttcatccccatgactcctctaagactactcttaccaaggtcccaaatatccttgatgtcactaaatccattkaatgtttcttagtcttcatattgtcacagaatttttagggtgttgcttttctggccagaaacctctgtggccagtgacacctttgcccgagttctgctcaggcccgctggactcattctgyccactcagcctggcaggtttcctttgactcatggtaccagcctggatcccacgcctgccaagggagactgcgtggagcggtagggggtgtgtaagcgagtatggggtctggccaccgcacagtcataygtgccagctgctgcagcggagcgggcagctccaggtgccagcacaggcgccagctctctgcaaggctgcagctggaccaggtgcaccgcaagcagcttccacagttggcaccagggaacacrgtggcaccctgaagcttggagatgccaggaacctcagggacccaaataccactgctatcaatattacttggcctgtcatcagcatttgacattccttgattcacttgcctcacttggattgtaggacaccacagttgtctggttttttcccctactttcctggttggtctttcttggtcctttttctggttccttctcattttcttgatttctaagctttagagagttcctgggcttagactttagacctcttctcttttatattttttccttagtaatctcatccaatcttattgctttaagtaccatttctatgccaacactcccaagtttatatctctattctagatctctaccagaactccagactcatatatgaaaccacctactggccatccccaaacgggtgactaatcacatcaaaaattaacatgtctaaaactgagctcttgacttcctcttttcatttcacaaacctctctgcccataagcctccttcatctcagttccttgcaattccatccttccagttgctcaggcccatttggggttattctgaacttttccctttctctcacactccccatctaatcctaaaaatcctgttggttccaccttaaaatttaaaactatagatgtagaaaaatgtgataacttctcaccatctccattgccactaccatgcttcaagccaattcatgtcctgtctgtattactgaaataggttccaagatggtgcactgattctacmtgtacctccttgtcatctattctcaacacagaagccaaaatgagtctgttaaaacataagctaaagtggtcattcctctggacaaaatactccagtggctccccaactcattcagaatgaaagccaaagtccttattttgacctacaagactctatataatctggtcctccatgcctctctggcctcatctcctagtctgtcccccattgctcaccaatgtagccactctgcccctcactgtcacctggaactcaagagcccttagggtcttctcacctactattttctccatgtaatgttctcccaaatatctgcctgtctagattcttcacttgagacgcctacccaaaattcatctaaatgaagccttcttggccatcctatccaacttttcaaacaaacaaaaaacccataacccaacacttcatactttatatcccacttatttaatttatctttaaaatttgtcatcatataacatattatatatttgacatacttatcttgtttattctctctctctccctctgcttctccctcatgtaaactccatgaaggggattttatctactttgtttacttctgtatgcccaacatacaaacaaaggctagagagagtatgcattcaatatctattcactgaatgaatagaataattgactagataaaatatgaattaataaacaaagatcaacaaacatgcaagaaagcaagacactatgagtgagagttcacagaaaccacaaaaaaagcatatttagaaccccttctccaaaagacctcagatattgaagttatccgcacaaaatataaccatatggaaatgtttcttaaattcaaaaatgaagtatttacaaataagcaaggaaaaaatatcaaaatggccagtcagattcataaaataatcagattagatttttagtaaaaacataataattgttaaaatgttaaaactgtgaatcggttaaacagaaattagacatagctgaagagaatattagtgacttattttataccacatacaaaaattaactcaaaatcaatcaaagacctaaacataagagctaaaactaaaaatttctcagaagaaaacataggagcaaatctttatagcaatggatttcacagtgattacttggatgtgatactgaaagcatagtccacaaaagaaaaaagtagataaattggactacataaaaatgttaaaacttctgtgcatcaaaaaacacagagaacagaacaaaaaggcagggagaaaatatttgcaattcatatttctgataagggttaataatatccaggatacataaagaactcctacaactcaacaacaacaaaaaccctgattttgaaaatgggcaaagaggccgagcataatggctcatgcctgtaatcccagcactttgggaggccgaggcaggcagatcacaaagtcaaaagattgagaccatcctggccaacatgatgaaaccctgtctctaccaaaaatacaaaaagttagctgggtgtggtggcacgcacctgtagtcccagctacttgggaggctgaagcaggaggatcgatcgcttgaacccaggaggtggaggttgcagtgagccaagattgtgccactgcactgcagcctgacgacagagcgagacttgtctcaaacaataaataaataaaaatgaaataaaaataggcaaaggacttgaatagatatttctccaaagaagatctacaaatggccaataagcacatgaaaagatgttcaacattactaatcatcagagaaatgcaaatcaaaaccccatactcattaggactgctgctatcaaaaaaatcagaaaataacaaatgttggcaaagatgggagaaactggaccctttgtatactgttggtgggaatgcaaaatggtgcagccatgtggcaaacaatatggcaatttctcaaaaaattaaaaacagaattaccaaatgatctgrcaattcaacttctggttatataaccaaaagaactgaaagcagggtctcgaagagatatttctacactcatgtttatagaagcattattcacaacagccaaaacaaggaggcaactcaagtgttcattaatgaatcaatggataaacaaaatgtggtgtatactatacacacaatggaatactagtgacctttaaamaggagagaaattggccaggctcagtggctcacgcctgtaatcccagcactttgggaggccgaggtgggcggatcacctgaggtcaggagttctagaccagcctggccaacatggtgaaaccctgtctctactaaaaataaaaaaaattagccaggtgtggtggcaggcgcctgtaatcccagctactcgggaggctgaggcaggagaatcacttgaacccgggaggcggaagttgcagtgagccgagatcgcgtcactgcactccagcctggtgacagaacatgactccatctcaaaaaaaaaaaagaagagaaattttggcatgccataacataatgaacctggaggactttatgctcagtgaaataagccagttacaatattacaaatacaatatgattctactcatatgagatatctagagtagtcaaattcatagagacaaagtagaatggtgattcccagaagctgaggggaggaggaatgggaagttttagtttaatgagtataagagttttggttttgcaagattaaaaaagctccagagattggttgcacaatatgaatgtacttaataccactgaactgtacacttaaagatggttaaagtggtaaattttatgttatgtgtattttaccacaatttaaaaagaaaaactaagtgtgggaaaatattgtctattgtggtttttcagtgtccctgaccatataaaatagcttgcagaggttatttgtcccttgaggacagatgatggtcaaatcaaatgaatttctagttggtgaaatttcatacagtaaagcagacagtgaaaaaattcagtcagaaaataccagtcaggtttcattttacatatgctcatagcactttgtaccttgttttcctagtacttgctctagctgttattttatttaatttgactgtgttaaattaaactaaatttggcctgaggctgtctctgcaccgagtccctaaataacaaatgcaatccaattcagtacctaaataaaccaaaagcctaatttaagagtatattttataacaaatagctgcacttcagccaatcatagcagctgagcttcagccaattacaggctgccaactgatcagaccacatccaaataaggcaaacrctgarctgtaatcaatcaagctgtttctgtacctcatttctgttttctgtctataaatgctgcctgcctacattgcagagcagagttctctgaacttcttctggttctgacagctgtctgatttgtgaattgttcattgctcagataaactctgttaagtttaatttgtcaaaagtctttcttttaacaactgattattttatcaatatcaaacagtaaagtccatgaggacagggagcaagcctggctttcattcacttttatattcctagtgcctagatacatctcagtaatacttcagtagatattgaaaacagaggagccacaatgtaacagtatcagtaaaagctaccattcattagacatctaagtgctttacatgtaatttcttatttgatcctcatcacaattctagcaagtagtttctgctgttttctgtgtggtttccacaggtaaataatagaattcatctatctttaacaattcattcgtctcttttcccatattttgacctcaaagactctttttctttttctttttccttttttcccaagacggagtttcgctcttgttgcccaggctggagtgcaatggcactatcttggctcactacaacctccacctcccaggttcaagygattctcctgcctcagcctcctaagtagctgggattataggtacccgccaccacacccggctaatttttgtatttttagtagagacagggtttcaccatgttggccaggctggtctcgaactcctgacctcagatgatccgcccacttcagcctcctaaagtgctgggattacaggcgcaagccaggctggctgacctcaaagactcttaatcaatggttcttaatacgggagccctagatcagcagcatcaacatcacctgggaacttggtaaaaatgcaaattttggggccccacttgagacccactgagtcagaatctctggggtgggattaccaatctgtgtttaaacaagccctgagggtgattctgaggcaggctacactttgaggactactgctctaaagtctccagttggatttttttttttcttttttagacttttcttccaaaaatcactctcctgagttattttataatrctggttataaaagtttgagggctctgaaaaaggttagctgtttggtttgtaattcgtaagtcaggtgtttgcaaattggtaactatacacacattatgaatatttcagctaaaagcaaaagaaaaatgctttgggcttatattttgctacaaggccaaaagttattgtttaattcactttactgaatatttacgctttggattgcctctgtaaaaggttagttcttataagaaattctctccataaaagtttatatttcaccaagttcttttccttatgtggtgccccctacccaaaataaatttaaaagttgtttagcaacaatactaatgtcaacaataatascttcctttgttttataattaaaggaagtttttgaagatttgtttagaattttaatatatctactgcagagatccacttttgtagagataactttgttatgttaatatctggtgctgtgagaaaggcaaatatgtatgcatgagaagaatcaacttgatatcaggcaaaagtgaatctgagaatttcttccaaagaagcttaaatttttgcaaaagtgagttacccactcatggcaaattctgccaaattatgttaaattgtgattttctgaaatgtggtttggaaaatgtatgcatcagggaaataaattaattgaaaaagaaaggattgtattcacaatgtgaaaggatgcaaaatggactagctccctctactcagaagttatatgtaaagagtactggcagagagaagaaaaagacagcaaaattcctccaacaacatgttgataagccccagcaaaagttttctggtctctcaagttgaaacaagtcaaaataatccagtaagttggctttaactgatgtgtgatattattaagtgctgaagtgaagtaactggtgacttggcttccatgatctgatcaaaattaaaatccccctcactcccaactcctttttgtaaaaaaaaattatatatttttctattacttttcaattactttgctttttaaatccagttctcagctttgtgttatgtttactgaatactaatagctcacttgattgggccattgttctgggccaagtatacactaaggactctccttacattatttaattcaactcccacaacacccttgtgaaatagaagtgttactagtggagggtgtccaggttcttggcatcttgaacaaagaattggataaaacgcacaaacacagcaaggaaagaatgaagcaacaaaagcagaaatttattgaacatgaaagaacactccacagtgtgggagcggccctaagcacaggggctcaaagtccgcattacggaattgttggggttttaagtgtcctctagaggtttccattggttacgtggtgtacgcccaatgtgaatgaagaggataaagtaaagttacaaagtcatttacttggcgtatgccctatggagaggatatttcctgtcacagctgaagtgtgaatccgccataagttccctgcctccagacctatattcctgcctcagaagatgataccctctttgcagatgagagaaccaaagatagattagaaaacttgcccaagatgacactgtggtaactggtgtaaccactaccaggaagcaaaaagtgatctgtcttatgcaaagttaatgttcctcaccaaattaaaaagcaaaacaaaacacaagacaaacaaaacaccaatgctctagaccagagatgagcggtctgggaagtacttgcagacaaagtaaagtagtaatggagattttaattcaattaaagagatcaagttgtttataaagaatactatagttcccaagaaaccacaggaaggctgtgttcctcacagaaaaagaaaagaaaagaggaggatttttcctctatacaattaccatgacctcctcaatcctgtaaagcagtgagtggttctcaaagtgtggtatgagggccagcagcatgggtagcacctgatggcttgctggagaagaaagttctaagttccctttagagctacagaaatacaaactctggagtgaggcccaacagcctgcgtcttaagtcctacagataattctgaagcacattcaaattttagaattactgcgctagagtttcttttgttgaagtactgggaaaactgatcagtacaacatactacaaacaacatttgcatgtttaagtcttggacctgcttacagtgaaattaatattaactcatttaagaatatttatccaattcagctaaatgttttaccaaaaatacctaagctaatgctttgatcccctaggtttaaaatcacaatagcaaacacttttcaaacattgaccatcaccagagactgttctaagagttttacattgattaactcatttagtcttcatgaaaaccmatgagatatgtactatttttaccctctttttacaaataaaacactgaggctgagacasattaagtaacctgcccaggtcccagagtgggtaaatgacagttgagatttcaaccctggccacatgagtctagagtccctgttcctaactgctagactatcttggggcaaaaactttgtaaaataaatcgatttaagggatatttctaggagaaggaaggaagggagggagggaaggaaggaaagaaggaggagggagggagggaaggaaggaagggagacagagagagagagagagggagggaaggagggagggagggcgagaaaaaagaaacctacctatgaaatttgaattttgaagaattttaatcatacttgtcaaaccagtcaacatattagaggcaaaaattagagtctttctaaatatattttcatgatgctgaaagagtcttctgaaacatatgttagttcctcgggacatttggaagaaatattaagcttaggtgactttgtggctctactgattttaagattctatgaaggtatttcggaagcaatttctttctcttcttctgtttccaaattatatgrtcatcttcatcctgtggcagtatatttatactcaagtataaccaagaaccactccagaaagcaaattgcactgacagatgaaatatccactcagtttatcaygttttggcctacacgaggaccataataagtagagaggaagattttamtatgtgtcccacaactcctattctcaatgtttaattactgctttttcagactctttctgaatatctggcttattggttctgtaccaatattaatttttgctgtactactatatatttagttaaccagaaaacttaaagtaagagtgttgtgaattcaaaaagtttgaagagctctgctcctggtccctgcctactccatggaatttctgaggctctgtttactttgagggtcaaarctggatatcttctacccgctgaaacttggaaagttttcatcactgctgctttgcaaaagaagtcagtttcctggtgactgaggaggagaagaaaggctggtatagagggtgggtgccaggaaagatggtgcccaggcaatcccagggcagcagcctctccacatcacaaagaatgtactaggatttggttcagtgctgaaaggaaagacatatcaagaataaatttacttaaaacagtgactttgctttttacatgacaggagtattgcccttgcaaaattcccaccaccaccatcacttcatctgggacttcttgagacatggataacaaaggtatatatggccacttgggaatgagagggatgagaatgcatgtcattctttgggactagaaaataaagaggcctctgaagtcacatgtctcatcctgtttcctctacctgatcttccatcctgtgtcctacctaagtggggagctttcccagatcttttgtgagatctttggaatcttcctatttcaaacataagatgctggtctcttcccacatattggtaactgtcagtggtttgctctggttccacctgaaatatgctctgaacatatcattgtaatatccaaagaattacccataaatccacctcccagtgcataaccaaagttggagatcttgctgaagagttccaggaaaagaaaaaagaaattttatgccacaaccttgactaaggtaggttaatggaagatcccttttaaatgataatattctgagacctaaacattgagaaggactcaggacaatccagagtatgagcattccaggcagaagaaatggtaagtgcaaaacccggagacagaaaccagcctggcatgtttgagaaacagaaaggtgagtgtggcagggcagggctgttcagagcattgcctgcaacaggttgtccacaacaagggaagggatttgtgccagcatataaatcaaagtactgctctttyggcaagaaaatctcgccaaaaaaaaaaaaaaagaaaaaaaagctgaactaaacagtatacttagtgatgtaattgattgttttaaggtactttttttgacattttgaaaatacatgaagaatcagtttggtttaagattacaaatatttgacaaaatttctgtggttttgcaatttaaagataccttaatatcttttactgttaaaataatgattaaacaataagctggkcacagtggctgatgcctgtaatcccagcactttggagaccaaggaggtggatcacttgaggtcaggagttcgagactagcctggccaacatggtgaaaccccgtctctactaaaaatacaaaaattagctgggcatggtggcaggtgcctgagatcccagctgtttgggaggctgaggcatgagaatcccttgaactccggaggcagagattgcagttagccaagatcacatcaytgcaccccagcctgggcaacagagcgacactctgtctcaaaaaaagaaacagataaaaaagaatttaatatttcaaaaatcttctacaatttgatcaccaccacactttttagtaacatttcgttctttgctcatataaataaatatccttatatagtttcaatcatatgagacacacatttttgcatgttcagttaatatcaaatcacaggcattttatgtatctataaatagaaataataagagtcactttaaaactataatcaccccttgcatttttaacaattgatttaagcatctatctttcatgagaaatttatctcctttcttttctgttacaaacagccttgctatgaaaatataggtacacactccttttccttcttttggattatatcctttaaagaattcccagaagttgaattactgagtcaaagaatatgaacccacatttgctatatattgccttgttgctttctaaaagtgttatagatatttgataatttagaatyttatctgcagaatttttaatgcaatgcaagacatttggtaactgttaaactgttttctttagagttctcagttctgtgacagctggcatccacaagtgaacttatgcaaaagattgtattatttatatgcatatgtatatttctacaattcagttaataaaatgattaataaaattgcttattgcaacaatttctgagaaacattagtcattaacagctmaaattgtaagcacagtactcaaaaagcagacataatcccttaatagctactggcccttctggagattttctgtaaccctgccatttaaacctaaccacacgggccagtaaccagtgatacaggagctaaaaaaaaacaaaaattatttaggtatttagtaagggtaagagagttctyagtggaattatcttttaacaaaaagcagcccccaaatcatttcttttctaacaaagaccagcttgtaaaattgagctacagacatagataagcaagctggaagcttgcataggtaaatgccagcagctgtgccaataggaaaagactacctgggggccaggtgtattcaacatggaggttccctcttcccttttctttgttgccacgtgtgtgcagtaaaaaagcaggcaacatgccgccagccaggtagagactccatctgcgtaataaaaaattagggtggaatatgtccagcttctttgcaggctatgtatatgatacacctggtccaaccagtctttgggccctatataaatcagagaccacctccctaagctcatctataaaacacacygcatctcactgagaacccagaaacctgttcaggactccttcctttgcacaagaaagctctcttctttctttcgcctattaaacttctgccsttaaacccactccttgtgtgtccacatcctcgatttccttggcatgagacaactaacctcgggtattaccccagacaaatgaagccgcttcaccaggatgacttcgggttgtgactcaagttcactctgctacaaaggagatagtcttgtacctgcagaactgggaagaatctaattcattacacacagaaatcgggaaattagtcaatagaggaattcacctagatacacccaggaacgaatcaaccaactaaattgagaaagaggaagcatttagttaatcttatttaggtttttaaatagtaacatttaattttgatgtattaactaaattttactaattcacagagctaggcwtgaagagtcttctatttagtttttcaaggatattaagatcctagccattcttgcattgctaacaatatcatggagtttcaaagtacatcttttcttttcatacttttcataacttccctgtcctgaacagttgtggcaggctcacacaggcagaagtaaaaggtatcaattaccctgtgtatggtccttgtctctgtgactttaaaaagaagacagagtttaaagacagccaagcccaaagccaaagtgggattctattaggttcccctcaatgtcagcattccagcccattttggcttttatcagtcctgaaaagactgataatttactgtgttcagcagtttttgtaaatatcwtgcttggcattccataacatsactccttttgttctgtgtatgactttgacctaacccctcattaaatccattatgtagaggacagaaaatatcacttatctgttgaaatgtttacttgtgggattctgaagtgttggctgctgcttgacacctgctaagttgtcatttcaaactgtaagtcacactgtattttgaagaaccttccccagaaaggctgacttcgggcacaggttcagcagtgctgaatggagttgctgtttgtggacaaagttttcaggccaatagtgggaaaaaaaggtagcatcatgaactgcaaaaggccttagctagcagcctcttccacagtagtaactaatcaaagggctggctccctacgtgcacaaagtgaaagagccttttcatttccatgaggtctcttcaggcatacatatgcaggcacacatgccccataaatcttaataaccatcttcaaagatgagggaaaattaaggtgcacctgctatgtcaactcaacttgccatgggcaaactgcaggcagacaacgccagttgtagaagctttctcagagcctatataaaaataagtcttattacaaaataccacacttgaaggttttgtttttaaatgcattcattgagtaaacaggaattttaagaaaaaggaaattactaaaacaatattcctattgaaattttaaaaataaagcaagtctgtcttaaacatgttttgagatctatattttcaactcagtaacatcaagtgtttttatatttagaagcaaaattttctctgcattggaaatatcctacctggtagttttcatgctrctaagaaaattgactaatgggtagatcgatttatcctgtggcatacagcctggttaaaaaaataagattcaggctgggcgtggtggctcacgcctgtaatcccagcattttggggggccaaggcaggcggatcacgaggtcaagagatcgagaccatcctggccaacatggtgaaaccctgtctctactaaaaatacaaaaattagctgggcatggtgctgtgtgcctgtagtcccaggtacttgggaggctgaggcaggagaatcacttgaacccgggaggcagaggttgcagtgagccgagatcgcgtcactgcactccagcctggtgacagagcgagactgygtctcaaaaactaaataaataaagttaaaaaaaaataagtgagggaaaacagccacattctctcatttaaaaagacaaacactacatgatctcatttatatgtgaaattggcaaactcctagaagcagagagtagaatggaagctggggattcagtggggaggtagctggtgagagagatgagaaaaggggagatggtcaaaggatacaaagtatcagttaggaggaataagttttagagatgwactgcatagcatggtgagcacagtcaataacaaygcattgtatatttcaaaactgctgaaagagtagatttttaaaattctcaccacaaaaaatggcaagtaggtgaggtgataaatatgttaataagcttgatttaatctcctatgatatacacatatatcaaaacaatacattgtaccccataaatgtttcaattattgtttgtcaattaaaatttttttaaataaataaaatttttaaaaccccaaaactaaaacaaaaaaaaagttcagatgaagtagttgagatatatcttatataactttcaatagagtattttagaatggtgatatattattgttaaaaaataatttgagggggtggaggtgagaagagggaacttagaggatgggtcaataggtgcagtgaaccaccatgaaacatatatacctatgtaacaaacctgcacgttctgcacatgtatcttgtttttttagaagaaattttttaaaagtatcataaaaaataatttgcttgacctcatacaaataaaaaataatttgcttgacttcataccatatgaaaaggttaactcgtaatgaatcatagatgtaaaaygagagctaagactaaaaaatatctagaagaaaatctttatgaacttgggtaggcaaagaattcttagatatgacacacaaagcatgatccttaaaataaaaatattaacaaattagattttatcaaattagaaaagtctactctttaaataacawgattaagaaaatgaaaaggcaaatgacagactaggacaaaatatttgcacaccactatctcatgaagaacttttatttacaacaaataaagaattcttacaattcagtaattcaataagaacacaaaaatctgattttttaaaaaatgctttaagttgccaagtcaatcctaagccaaaagaacaaagctggaggcatcatgctacctgacttcaaactatactacaaggctacagtaaccaaaacagcatggtactggtaccaaaacagagatatagatcaatggaacagaacagagccctcagaaataatgccacgtatctacaactatctgatctttgacaaacctgacaaaaacaagaaatagggaaaggattccctatttaataaatggtgctgggaaaactggctagccatatgtagaaagctgaaattggatcccttccttacacctgatacaaaaaattaattcaagatggattaaagacttaaatgttagacctaaaaccataaaaaccctagaagaaaacctaggcaataccattcaggacataggcatgggcaaggacttcatgtctaaaacaccaaaagcaatggcaacaaargccaaaattgacaaatgggatctaattaaactcaagagcttctgcacaagcaaaagaaactaccatcagagtgaacaggcaacctacaraatgggagaaaatttttgcaatctactcatctgacaaagggctaatatccagaatctacaaagaacttaaacaaatatacaagaaaaaaatcaaacaaccccatcaaaaagttggcataggatatgaacagacacttctcaaaagaagacatttatgcagccaacagacacatgaaaaaatgctcatcatcactggccatcagagaaatgcraatcaaaatcacaatgagataccatctcacaccagttagaatagcaatcattaaaaagtcagaaaacaacaggtgctggagaggatgtggagaaataggaacacttttacactgttggtgggactgtaaactagttcaaccattgtggaagtcagtgtggcgattcctcagggatctagaactagaaataccatttgacccagccatcccattactgggtatatacccaaaggattataaatcatgctgctataaagacacatgcacacgtatgtttactgtggcactattcacaatagcaaagacttggaaccaacccaaatgtccatcaatgatagactggattaagaaaatgtagcacatatacaacatggaatactatgcagccataaaaaatgatgagttcatgtcctttgtagggacatggatgaagctggaaaccatcattctcagcaaactatcgcaaggacaaaaaaccaaacaccgcatgttttcactcaaaggcgggacttgaacagtgagaacacgtggacacaggaaggggaaccatcacacaccggggcctgttgtggggtggcgggagcggggagggatagcattaggagatatacctaatgttaaatgatgagttaatgggtgcagcacaccaacatggcacatgtatacatatgtaacaaacctgcacgttgtgcacatgtaccctaaaacttaaagtataatttaaaaaatgctttattaaagaagagatgcaaatggcaaataaacacatgaaaagatgctcaatgtcattaatcctaagggagatacaaattgaaaccacaatgagataccagcacatacccatttgaatgtttttttaaaaaaaaaacaccgataataccaagtgctggtgaatkcagagatatggaaatctcttatattgccgatgggaatcaccaaaaactgaaaacaccccaaatatccttcagtgaatgatggatcaaattgtgctacaaccatataatgaaatactattcagcgataaaaaaggaatgaacagactactgattcatacaatgtggatgaatctcaaatgcattttacaaagtgaaagaagactcaaaatgccatatatgtatgaatctgacatttataagaccttatagaaaaggtaaaactatagagacaaaaatagagcagtggtttccagggattgagtcaggggaagaagttgattacaaaggaggctgggggactttatgaggtgaggaaatggttctatatcttgatgatggtggtggttacccacctgcatttgtcaaaactcatagaactataaaaggtgaatcttaccagatgtaaatcacacctcaataagaaaaattaaatctgattcctatttcataccagattaaaaatcagttttaggtacattaaagattaaaacataaaagacaaaaaatgtttaatacccaacacaggaakatgtgacttaagatctyagagtaaggaagaattccttaaataagacacaatataggaaaaggtagatatatttgattacttctgttcatctgtacatcaaaagagtcacaaagagagtgaaaagtcaagccccaaatgataagaagatatttccaacacttgtaattataaaaaaaatcaatatcaagaatatacaattaactactacaaaagaataaaacaaataatcaaatagaaaaaactgggcaaatatcaaagtcaattgactttagttatgcactttagagtgcacacatctaaatgttgtgttgatgccctgggatgttgagtgaataatacaattaagtcacagaagaatacctaaagtataatcccattggcataaagttccaaaacagacaaaattaacaatgttttacttaatagtacatatatcagtgattaaacaataacgaaaagcaagggaataacagcacaaatttcaggacgatggttaattttgaattgatgggggaaaggagggagttacaggttattttctatttcttaacccaggtggcaggttcacacatctatttttttattatataaagtgtgcatatgtgttttatacactcttatgtttrtggagttgtgtttgctcaggtcctttaagaaacagatgccaaaatggggttaaacatgcaagagacttattagggaaatgcctggaagggaccacggtgcaggtctgctacctctgaaggagaaggagaaggaagcaggattagatagtcagagccttggactgcagcacagttctaagaaagtttcaaccagatccataaggagtcaaaatcacccatcaaggagtccccattttgcagggacagtgttcttgtcatacccagccaccagttaggaccagccttggaaatcatggtcttggtatgaattcagaggtgctttcagaaggcagtagctgcgatgtcagtcacattacccacagtgggagatttgaaaagtgcatttttgtggctgccacgatagtatgtttcaaactttttaaaaactaaagggtaatgaaaatgggcaaaggatatcaacaaactgttccagaaaagaaaagcaaatggcccttaaacaaataaaataatgttcaacatcactcaaaccaggaccgttaattttcagattaaattgcattgaggatccaggtgattccaagcctagggcagggaaagtacaaaggcaaggctagctttttgtttgttacagaacaatgtcatctagtacatgtagaagcaatactggaattagaaaaaaaaatcatccttttctagtccccaaggtaataactggtttggcaaagatagccaatggatgctaaaacacggtgcaaaatctcaccccatcaattactgaccacgtacaaagacaaactgtacattcccaatggagagattcagcggtcaccagccttaaccaagtaatcaaacctgaggatggattcagtgggaaaacctgagtgtgtgtgtgccagctcacctcacacttacagggcctggagctcaagaacacacagaagcccaatgctattgtcgagacatttaaaacttgtgaattgaactaccaaccttcgtaaagtacatttcattctcatatcttgacaaatatacctttataatgtgtattaaatgcatgtaagatacatgtaaagctatggttttcaaaccaggatttttagataactgaaagctggaaaaatatcaaagacaactgaattttatgattaattttatttttatttatttattttttgagatagcatcttgttctgtcacctaagctggagtggcagtaacatgattatggcttactgcagccttaacttcccgggctcaagggatcctccagtctcagcctcctgggactataggcatgtgccaccatgcctggctaatttctgtattttttgtagagacagggtttcaccatgttgcccaggctggtctcaaactcctgagctcaagcaattcgcctgccttggcctsccagagtgctagattacaggtgtgagccattgtgtttggccttattattgtacacatgtgaatgttgtattgctatgctgtgatattgtaataaaatagacacacatagttttgtaagttatatatttatttggacaaaattaatatatgttgccctcactttaatctctaactaggttgttataattaataatttcacatgaattgcagtctgtagaaagtaataatctaaaagattaaaaatataaaatgtaatggtattaaaatatccaaaatttgaatattttatcaaaaaaataagttaaataaatataaacataaaaaatttaaatttacttttatatatgctttccaaaaatattttattctaaatattaaaaataatctattaaaaggcaaatgcaatttattattaacaaaaatcaaagttttatatagggttaaatgaaaagtatttaataaagctgaaagcatatttcattttttttttgaaaacttagtaaaagcttattacatacttttatagaaataagtggtttttttgcaattcaagtgtttaatagtcatccattgcccacataaatattagatatcacacttcacacatatatatgaattgtttgatactaaaacatgcaactgttacaaacaccacacaaagttatgaggatttctggaacctcaatttccaaggttaagaaaagcaagaaaatggatgcttggtggtactggaggcaatccttcattatgcaagattttttttgcattcatgctgagaatgatttggcgagttaatttgtcttgtcttctaagtacttctacccctcacctcctccttgcatgctgaagcagtgtccctccatcattggcagtaggcacaaatctaacttttcagggcactgraaatggatgctattaaggtagtgatataaaacgatctctattacaaagtgaaaaaaaaaagcaaggcactgaaattattatagtatgctcctacttgattaaaagaggagaaatatttatgcataaattcttttttggcaggatgtataggaagttaatcactatggtgtccgaaaagaggagaattaggtagctgggatgagagggatacttttccctgatgaccctttcgtactttttgaattttaaacatgtgaatgaatcacttactcaaagcaatttaaaagctatccacaaaatgaaagggcagatatcatgaatgtcagacaaaggtttaatgactataatatataaagaatgtatagaccattaagaaaagaaaagagaggactgggtggagtattttatcatttacattgtttagaaagctggtgtaggttgacctttaacaggtttcattactggttttaaattgtctacaggcwatatacccccatatggcctgtacccagggtaggctgatgccattgtcctgcccttagtgtgtgtctgtcccaacagaacactgagcaaatgtcatgggcaggcaattgacacacagaaaaaaaatgaagagatgggggtcggggggtgggtaggggaagagaaaaagaaaagccatgtcgaaatacattcaacttcatcactaatctttgaaatccaaattaaaatatctacggaatagcatttttcatgtgaaaaaaaaaaggtttttaagatagtaacatgccatggtggcaagtaattgaagaagtgagaatccagatttttaaatatttttaartgttcataaccactgacctcaaaattccatttctggaaaattatctaaagaatgtaatcagaggtgggaacaaaagtgtattatttacaatagaaaaaaattgaaaaagtaaatgcccataataagaaattaagtaaattatatctacattatgagaaactatataagcaatcattaaaaataatgctacaggctgggcgcggaggctcacacctgtaatcccagcactttgggaggccaaggtggrcrcatcacttgaggtcgggagttygagaccagcctgaccaacatggagaaacccygtctctactaaaaatacaaaattagccgggcgtggtggcacatgcctgtagtcccagctactcaggaggctgaggcaggagaatcgcttgaacccatgaggcagaggttgcattgagctgagactgtgccatggcactccagcctgagcaayaagagcaaaactctgcctcgaaaaaaaataaaaaataaaaaataattaaataattaaaataatgctacaaaataacgtttattgacatggaaatgttaacaaggcaattaaaaccatatgtagcaaaggaaaccatttttatcatgataaaattaacataaaatgtaccactttaaccayttctatgtgtacagttcaatggcactaggtacattcacattgttatgccccttttaccactacccatctccagaatttatctcatcttgtaaaactgaaacttcgtatccactaaacaataacttcccatttctccctcccctcaacccctaggaaccacagttctactttctgtgtctatgaatttaactattctaggtactttatatataagggaactcatatttgtccttttgtgactggcttatttcattttgcwtgacgtcctcaaggttcatccatgttgtaacatgcatcagaatttccttcttttttaaggctgaaaaatatttccttgtttggatataccatattttgtttatccatttgtctgtcagtgaacacttgggttgcttctaccttttggctattgtgaataatgttgttatgaacattaatgtacaaacatctgttcaagtctttgctttcagttcttctaggtgtacacacagaagtggaatcgccggatcacatggtaattctagttttaattttgtgaggaactgccatactgttttctgtagcaactgcaccctttttcattctcatcaatagtgcacaagagttccagtctctccacatcctcaccaacacttgttgttttctgtttttttgaraatagccatcctaatgggtgtgaagtggtatttcattgtggttttgatttgtacttccctaatattagtgatgttgagcatcttttcatgtgcttattagaaagaacccattttcataacagaaaaaagtttttatacaaatattatatggggaaaaaagaaaagactagacatcaaaatctttacagggtactgatatactgtttagcaaatactggctcccttcccccagtatcaccatgagaggagtatgcttccccgcccattcaagttggacttctccatgtgccttgttttgggccatggagtatggcaggtctgatggcaggccttaagaaatatcacatttccactaatcctctgartagacatgttccaagtaattactgagtttaagaaataaagtgacatctgtgaaacaaacctaaaattggcctgtagcatgaaacagagctgcccaagcctacccayagaactataagcaagaaataattgctcattgttttatgccactgagctctttgaggccatttgttacactgaaaaagctaactaatacatagagattatctctggatagtgaaattaagtgatttttwaaattatttgtgcttctaagtatttttcccaattttccactataaatatttattgtttctaatatgatttaaaaacctgaaatatttcatgccaaaatataacaatggttttttttctgctacaaatcacatattttaaaagtatttttctttaaattttgaatttgtttcacaataagcatgtcttacttttataaccaggaaaaaagtaataaaggttttgtttcctttatttttttcctggaatgatggtcattcatgaatcccaaaagggactttgaggatttagtagtgaagccaagtagactaaggataaatcatccttctttattggttgcctggggctggggtgggactggaaagtgattaaaatggcactgggtttctatttggggtgttagaaatgttctaaatttggattgtgatcatggttatagaactctgtaaatttgctaagaattattgaattacatattcaaaatgggcgaattttgtggtatgtgaattacctctcaacagtttttttttttatttcctttacatgacaatttaaaggaatagactttagtttcaagaactggaactacaaataactctttgtcctaatgaaaacacaaacaacaataacaataaaaacaaaaaataactatacwgactctcaatgaaaaggtagactaagagtctttgttgggggtttgggagggggaagccacaaccctgaatttaacaggaacacgttcctttcactgagaaaattatgatttgcaatcacattcagcctaacagtcccaggtagtcccagatastgtgtaagagtcaggcttctggacagaggtttagtaatgggatggattcgtgtttttggaagccagtaaaacttgaggacgagttaggagacatgtgaagcaaaagcacaaccgcacccagcttgctaacaacggcaagatgcagacaccgtccactgcccccacatctatgggctaactagttagctgctagttgaaacttacagaatattaatgaatgaattgagtagttccttgtagggacttggaatgtaaccgaacactgtatggttggttcagaggttagcttacttgaaccaaaacaatttgcaaattatgtaaactaattcagagtacagtaaaagccctgtgtccccatccaaaactcctaaatcagcccctctgtctggaagtcatctgtttgtcaaacctctgggctgacatctaactcttgcaatttgaaagttgccataacaaccacggggaaagttttgctcaacagaatataatccaaaagcaattaaaaaaaaaaaaaaaaccttttgagcagcttctagaagccaaagggaatgtgaatgatgcacgcccaacaagtaaaatttctcacaggtrtaaaatctggggatcacaaggcaagaaacagaaaactagaaggtattgtcaaattaacaaagctggaaacrtggctggctcagccacctctctttatcctgggcaccttacacataaggtgtccaagaaatgtttgttgatttgatctgattgagagcagttcaaatccttatttcatttcccaaagaagaatgagcctatctcatttgagctgggacccaaatgcactaaatggatgtgaatttcagaaatccctgtacttgaaatgattgggcttttatcattgtgctccctcaaccacccttgagttagtattcgatttgacatcagttcaaaaaaaactgcttttgcaaaaattaaattcaattaagacaaaatagaaaataaaacattttaaaacaacttctttttgaagtgtatcttaggggaaattctttctctgtgggcaatgcgaattttcttatttttctgtgcatcatttattctgtcttgtctgatgagggcccttaattttttttttttcatctcctatttttagctttgtgtttcagggaacctctccacgtttcaagggaaggttgtgactaggtctggccaatcagaaattttacactgcccttgccacaatgattggttcagrgttatacacatgacccaatcagaactagtagagtcaatgctggccgattggctgaaggaactgaaagagttcacataatctcatcaggtttatcccttggattgtgagggactgtggcatgctgcaaataacactgcaccaacagataaaaggacttgagttttaaacttggccttgcttcctgtaagctgtgtggccttggacaagtcacttgacctcctgggatctcattctcctcatctgcaaaattccttggaagtttctgggaggattttataaaggatgcatatgtgaagccactttatatgttataatgctttackgaaacgtcaggccttgccttttgtcttcacagcagcccaaactgaaattagcaggtagggctgtttgggttcagtgccctaaaaaccaaaaaccctgcccaagaagaagagaatctgaagccacagaatgtcacagccaaaagggagcttggaggatatctggtccaacccccttcatttctcagatgaggaaacttgctctatctacacttgaaagggaggaaatgacataaggacaactattgcaaccattcatgcgggttccccacrttaacttaaagcaatcagttaacaaactatggccttttaagacaaagaccatgcatgtgtttccctaatgtgcttatctttttctgtggtaaacagcgtcacctgcagataagtgacagctacagaaaaaataaataaataaataaataaataaatggatttaccggacagttcaattcctccgcacagctcagccatctgagttcaaagatggaaggaaaagagatttgcagttgaaaaaattgctgagccatgtgtctgaaatgcgttaaataattgcaatagggattttatttgtgttttttcgttttccctgttggtgagagccactcctgccaacaaattatttgccaaatggtgacttcatttatgatgccggtaacgtgatgtttaacagctgacatgtgaccagtacttcaaaaaaactgtgtcccttagcttacatggcaactgaagtgttgcaaaaattcagagatccacatgtaaaattcaagaatttaatatgagtaagagttattgaaagtcacatctggtcaatttttcctcatttatttatgtattattttattattattacttttttagagacaaagtcttgctctgttgcccaggctggagtgcagtggtatgatcatagctcactgtatacctcaaattcctaggctcaagagatcctcctgcctcagcctgctgagtaactaggactacgggtctgcaccactgtgcccagctaaattatttttaaagattatactaataaaaacctctagtactcattacgtacaaaaagcagtttatgtatattaaataatttaatccttccctttctggaaaactgggactaactctatgaggtaggggctgtttttatcatccacaggtttgaagtgaggcccagaaaagttgagtaactttcccaaattctcatagcaggaagatagtagagctgggatttgaacctaggaacttggctctatggtcagaatgcttaaccactctattatattgatctttttgtgataatcttgcacatagaataccttgtattttctttaaaaaataacttgtatatgaaattaaaatgaattaaaataactgttcaaatttatctttctagaacacttttttaatgacagcatcaagaaaaagcagagtaagaatgcaaaatttggagccaggtcacttgagttgaggcaactgactagtagctgttatgaccctgggataagtgcctgaaactccttatgcctcagtttctttgtctgtaaaatagggataagagtggtacctaaatcctagagtgtttgctggagagttagtgagatagaaagggaaatagtttatgtaaagtgcatagcccagtgtctggcacataaaatatgctcaataaatatcacccagtatcagtatccctattatcaataccattattaccttgagtattagacaccacttcagttctgcttttgctcctcccagctttacctgtctcccctccccacctctcaacccctgcagtccacttccgcataggctccaatctgcttctcacatctgccacccagctgtgctcctgtcatctcctgccctgggacatctctgttgacctcaatgcatgagactccaggggaaatttcttcatacccaagcatatgcaacccagagtgctaggcaacgagccctctaagagtcaaaacttgaagtctttctttttccctgtcaaagaacgtatgagttggctagagttgctataacaaagcacgatagactggtgacttaaacaacagaaatttattttatcgtacttctggaggctgggagtccaagatcaaggtgtcagcaggttggtttcttctgaggtctctcttcttggcttgcagatgaccgccttcctgctatggcctcacctggcctttcctctgtgaacatgcatccttgatgtctctgtgtgtgtacaaattttctgttcctaaaaggacactagtcagattaaaacagggcccattctatcaggctcacttatcttaatcacttctttacaggccctatctccaaatgctgtcacattctcagatactgagggttasgaattcaccatatgaatcctggagaaacacaattcaacccatgacagagggtcccaggctacaattcattaggctcctcacaaggtcctgatgggcagaacaaccagttgactgtagtggctgacttacccgtctttcctggtttacaaccctactcctctttgggatcatactcaccaataaagacttcatacataggcttgctctcaagcccttctttctgaagaattgggactaaggcatctaatggaaattctggatgatgtcctactgcagggtcaaccagacctgtcaaatgtggccccagccgtcctttctgctctcactgccccatctgcacagggcttggcctgtgctcaccacaccagactctgcatgttcccttgccctcctgggacacagagtcctcacctgtaaatgacagggctgggtcccttcctcccttccaattgtataagaaagacatgctccaccttcctatgagtgaccttgttcactctcctggagatgagttatgatctccatagaattctaaataagaaaatattccaggcaaattgaaaaagaaaaaaaaaagatgtcctagatttacacaaaaaggaggcagacaaaccacacagtagttcaaaagctctctaaattagtgctccagcactatatgggaaagttaacagatatggagctggccaatcccagattttaattaaaacccatcttttaggccaggtgtcgaggctcacacctgtaatcccagcactttgggaggccaaggcaggcagatcacctgaggtcaagagttggagatcagcctggccaatatggtgaaactccatctctactaaaaatacaaaaatcagctgggcattgtggtgcatgcctgtaatcccagctactcaggaggctgaggcatgagaattgcttgaacctaggaggcataggttgcagtgagccaagttcactccactgcactccagcctgggtgacagagggaggctcggtctcaaaaaaaaaaaaaaaaaattaattttaaattttttttaaaaaatcttttattagtcaaaatatgactagtatggccacccagccaaaagagagaactagcttaatacaaatgtgctctcacacacatacacacaaacatgtacttcttagcattytgttattttattctatgtggaagcagcagtatgtggatgcaaatggatttttcaagtatttctcttggcattatggccatatttaatgtaacatccagtaaagcagaaattttaattaagtttatggcctgactatctgtatttgtttggaatttctgtctcttcaaagcaaaatgtgaacctggctttagacctggaaatatctcaggctgcaaccaaaaacattatcaacaaacggcaaatgtgtggtctgaaatataaaataagtttagaagaagttgaagcctattatccaaatatcacaaaatacctggatattaattatgtagtcactaacttatttggatatgcttcagggaagatgaaaagaaaattttatatattttcaaggggagaaaaaaactatctcagcatcaataaactaccaaagagccatttaaatgcattttatttatgtctctgggttttgatgtggttttccttttaatcttaatttctttgcattttataaatgaataaagcctatgtacaattcatatttaaatgttttagttaatctggaggtttattttctttaagagagtacaaagtcactaatgagtaccaaataagaatagtgaatgtgaccaatataaattagtaagaagcatttgtgtgaacttggaagcaataacaaaacacttaaaataatctctactgtgtaatataggcataacttggacctgccatctcttgtctgcctttggggggatgaattgagctgcccataattcaactttgtattctctgtgaagtatttgttacgcgaattaaaggtgcaaatagatgtccaatttgaaacggaaaatctggatggaaaccctgaaacagcattgctaaactccctacttaaattcatatgaaggcaaaaattcacaatgctaaaaacaagtacagtcaactcactgccagaatctggtaggccttctcaattcttgtctccagaaaaagaaactgtctacccaggtagaaatgcctttatcttttcaccaccactgtcttgctgcatgaattcaagttgaaagaccagtacaagtcctagaccaggcagaaaaatagaaactctgtcctcttatagtactgctgctttttgaggtagtcagggccctgtctctcccactaaactctcccgtttccaaactaattatcttctcccaaacttgtccattatatatactcataaatttactcatgccactgattgccatgccaggcactgttctagaagctaggaatacagcaataaacaacaacaacagcaacaacaatatagactgctctggtgaagcttatcctcaggcagggcacaaagcagtagattttccgttcagagactcatgctctgagaaaatagctctgcacaaggtaagagtgagatgggaatagaatattgcacatggggagatgtggtatccacaagaaaagtgctgtagtgggaacaggaaaatcccattttcgtgtgttccacccatgctgagtgataaagcccaggaactgagacttacttaatacagtccggcaaagcagaactggataaaagcctgctagacaacagggagataaacctgttctatgtcaggtaggataaaccacagcagagtgagagggacagggaatgcaggggtaaggggtgggagtgaggacagggtagttggggaaggccttcttgaggaggtgacgtgtgagcagagccctgaagtaggtaaggaagtgagccacgtggacatgtggagaagagctgcccaagcctgtgcaagggcgtcagccttcacccggttgcctctgctcctgtaggaactcttggtttgtttagtcaaggccagttgtttctgccaacagcatctccacaacacatcttcctgcttctgtactccaaaaccttctttaatacaaacgtccccaatccctgggcaatagacttcacggctcaccttcacggtagaagggctgcaagagaaagggggaaaacaaactggatcacacagaaagtaagtatagttgaggggtttacaaaacaagtatccacaatatatatattctagaaaaattattaaactaaaaattaaaataagaagaacaaaaggttctataaaaggatgcaaatcaggttttgctcagtcttgacatctataatagtaagtttcagaagacaataaagactttagggaaagggtcatgacaccagaatgcatgcatatgtatgtctgtgtgtgtgtatgcacacacacacatatacgaagacaatagtaagtcattctcaagtttgtgacatctcagaaagtgaatcatcacagtaccttgaggaaatttctagaaaatatatgcagacgaccaagacatagatgacaagtaagacctccagaagaggaagttgtagctaacaggccagaggaatcctcgtgtactcaggctgggacctagaatcaagagctccagccgaatgcccacgtcgggggccacgcatggccctgcactgcttccttcaccaccgcctctcctgcagctctctctccgctttccagtgccaggaaatgggcttgttgcaccatatccttcaactctcagttcagaggaaatcttctgcatgtttagtggccacttaaagctgtaattaatagtgttctcttccagtgcttgctaacattggctatgtgggtcacactgttaagaaactgaaccaggagaattactttcaaaaggtattttccctgcacaaaagtagaatgacatagtgcaacataatcgtccttttttttctgccatggaacataagtgatggytttctgcacctttaaaagtcatactgagagtcctgagtcattgaggtttaattgggaaagactactaaaccaccaataacagatatgatctgcaactgagcctcttgaaactctttcttacaagatctgtgcatattaacaaaactttaatccagcataaacacaactatgtgtttaaaaaaaaggaattataagaaaatgcacccagatgttaaaggaaggaagggatagtttctctgggaggtagactttttatttatttatttatttatttatttatttatttatttatttatttatttgagacagagtctctctctattggccaggctggagtgcagtggcacgatcttgactcactgcaacctctgcctccccggctcaagcaattctcctgcctcagcctcccgagtagctgggattataggggtgtgccaccatgcctagctaatttttttatttttagtagaggtggggtttcaccatgttggccaggctggtcttgaactcctgacctcaggtaatccacccacctcggcctcccaaattgttgggattataggtgtgagccaccgtgcccagcctctgggaggtagacttctaagtgatatttttcctgctttatatagttagcagatattttaaaaacagatttttaagaaaccagcctatgcaattgcacatataccatgaaattgcaactgtttaaaaatcaatacagatgcttctcaatttacgatggggctacgtcccaataaactcattcttaagttgaaaatatcataaggtgaagatgcatttaatacacctaacctccagaacatcatagtttaaacttgtctcccttaaacatgtccagaatatttacgttagcctacagttgggcaaaatcatctaacacaaagcctattttataataaagtgtagaatatctcatgtaatatattaaatactgtactgagaattgttgggtggatacttggagtatggtttctactaaatgcatttcatttttgtaccaatgtacaaaaagtgaaaaattgtaggtcaaaccttcataaagtggcaactgtttgtatgtcagaagaagaaaataaatcacaatgtatatgtaagtgaaactattgataatcttttttttccttctcttcatttttattttctaaattttcaataggagcatacattacatctgtaattgaaagaaatttttcttaaagtaagatggtgagtgatttgagcatgcttcaagagagcaaacaggctgctatttggatgccaatcaagtgattgctaattacaaacaattctcattttcatcaagtcaatcaggcagtttttacttatacttcaagtagaagccaatgtttttagttgcaaagaactgaattgcttctgtgatagagttcaaactgcatatgcccgttctttgaagacattagtaaagctctataaatctttaatccaaatttaaaaggattttctataggggagaaggataacagaccatcagtggtaacctcaaggtggattgagtagtcagatctgtgtcgctccaggcaaactccgccaggtccacagcaggagtgcggaccctttgtgtagctcacctcatacaacccagtccaattttggatgccagctcattccttaattcccttcagacctcaggatctaaagttagaaagcccataaagataggacacttgtctgccatgctaacttcagtatcctagaatatgggaggtgctcttcaatttgtggaactgaaaaatctgttcaagtgcccaactttactgaaggattggaaataacaaaaaagaataaaagatcaaagaataacaaagaccttcacactggatgtgactgccagcagaatcataagaggagcccttccagaggaaagtggcctactagcactttctccttcatccctggcctgcgcccaccactttgcagtggccagcgccttccccagcaagagcccctagaccagttgtcttctcccagagcccaggccccaaccaatgtttgaaggaaaacttcactgctcacaaacttctgccttccaggatggccaaccacccaggaagccctgacattcaggaaggccccacctcctattgccaaaaggacaaggcatccgaattcaagctgacagtagcatctttttcacattttgaaacatctggtataaaaaaacaccaagagggaactgcgcacagaactgaaggtgctgggctctggaactaccaggcccacctctgtgttccgttcacattagcaaagagaaactagactccttcatcctttgttcatgcccacctcagctctagccctcctggcgtaatgatttggttctttgggaaccaaaagaatatccagattcgtagcagcccaaatctatattaagaacaagaagcatttccttaaagaaacacattgccaagatttcacttcacaatgaaaacggcctttactttactttgccaatcaatttagttgttcattgtcttaaatccttccactttggaaaggagttttgctttccatttacattaccaaataccacattaaagagactctcaaacactgtgttctcaaagtggaaatcaaggcactctctctccagccctgtttctccaagtttgcccacagctgccctgcctcggaatgacctatggaactttttaaaaatgcagattcccaaagatcttctgaatcagaatttcataggaatgggccccagaatgtgcatttaaaaacaaatttcctgaggaaaaagctacctggcttacatgtttcctgttcattgtgataaataaatgaacatttaaaggtggggaggagtttcttgagtaattctaatgcaaactaaagaccccactgttttgctctagaaaaacaaactgaagtttaaaaaaaagtctgcttttgccggcccggtggctcacatctataatcccagcactgtgggaggccaaggcgggtggatcacttgagctcatgagtttgagaccagcctggtcaacatggtgaaaccccatctctacaaaaaatacaaaaattagccggggtggtggtgcattcctgtagtcccagacactcgggaggctgaagcatgagaatcggttgagcctgggaaacggaggttgcagtgagccaaaagggcaccactgcactccagcctgggtgacagagggagatcctgtctcaaaaacaaaaacaaaaacaaaaacaaaacaaagtctgcttttcccactctcccttccatgattttccatcggtattccaaattattggggttcagactcagctgaaaatcctgttgtacctcattttacggataggaaaatgcattcaggaagtgcgcatatgcagaatttgcaagcacttttgtggtctgacttcatgatggcataagctcatgtggtccatgtactttacatacattatcatatttaatcccataaatagaaaaaatcttatagatgtcattgttcccactttgtagttggagaaactgaggctcaggaataatttgaacccaggtatgttctttcatccagagtttgggctttccctactacacccagatgcctgtcatccacccaccaatgtttaactagttttctcttatttttgttctagagttattttatatctggacttttctcctgcccagatatattctatatgctaattaataccttaaattacatatgtagagctatccctttgatttaaagatttgttttctgctaaattcacccttttgactttcgctaaaattcacgttttattattctttggacattaatacttgatcagttcctgaaaaccttttaacaaggaaaggatggcacaagtatgagatgctggatgcagagggtgggaaggagatatctcgtcactccagggagaggcaacaatgatcagcgaccgttaccttcacagttttacccatgaccagcttgccctgggagcctatatggatcttttaggatccatggtcactgacaacagtcctgttatgcccttagctgagtttttcagaggatctttatgtataaaatggcaagggaaaatattaattgcctggagagggactaagaatacaattaacatccattaaagtaagtatgtttgttattcacactacatcttcgttttatgccataaaaatgagatgcatttgggttgtgagtcaatctggcaaatcaattttatgagcttttccttataagttaggccagtagcaggcccttcattgttcaaaaaggaaatgacacaaagagttggtttaacagctgagaaggcaatggaagaccagaagagcaagtagaggtctgggcatttgcctctttctttccttatttccattggagtatggtttttaattgcaagctctatgaggctagggatggtgtctgtctggttcactgcattatctctggtgcctagcactacaacgagaccagagaaggtgattagtcaacatttgtgacaaatgttgaattaaagcctttcagaaatcccatgttggctttgttacactgattttgtattttctaatttcttgcgtgcgatagaattgaatgcagtacgaatgtcttaagttactaaatacccgagcacatatgcaagatttcaaacattatttttttgtcgttaaagatatgactaggaaaaaaagtaatcaaatagaaatacgatagtttagaacagtgttgaaggatcaaatcaatccaaattcaaaaatatcacaatgtttgttactatttttctctttccttttgttctggaataatattgctttgctccagaaacaatgaatcatttgtcatctgygttatgctctcttccaaataaaatagctatgtagaatggacttatagacaaaagccttcttgagtctgaagacatgaggataatatatttaagactggtgattaatagcagttatagaaatgccttaagttttaaagtctaaagaactcaatttttagagtgctgcaagtttgttttgtttatatgaattataaatatggaaaaacattatttctttgggtagagatattaaagtaaagtagctttgttttgttttctaagtatgtactattcagggctattggatacggagtcataagcaatctatttacttattgtggttcatgctagtcttacaggaatcgttgatacttcggcattggaatgagagaattatagaataataaagttaaaggccgggcatggtggctcatgcctgtaatcccagcactttgggaggctgaggtgggcagattgagcccagaagttagagaccaccttgggcaacattgtgagatccctatctctacaaaaaatacaagaaattagccaggcatggtggcgtgcacctgtagtcccagctactcataagggcgaggtgggaggatcacttgagcctggcaggtggaggctgcagtgagctgtgttcgccccactgcactccagcctgagtgagagaatgagaccttgtctgaaaaaaaggaaagaaaggaagaaagagagagagagaaaggaaaagaaagaaaagaggaaggaaggaaggaaggaaggaaggaaggaaagaagggagggagggagggaaggagagaaggagggaaggaatggaggaaggaagaaaggaaggaaggaaggaaggaaggaaggaaggaaggaaggcaggcaggcaggcaggctagaaaagacttcgaaagatcataaggtgtgggctttgttgatacacatattctaggctaggcaatctgttcgaaagtcttagaaataggcatgccctctgacc

SEQ ID NO: 93493 - DNA, 12735 bp, Homo sapiens
tgttgtacattaaggtctagctttctgtgtcaaacctaagtcttggagtgatagttaagagggtaaaatttcaacaaaagctttctgtgtcaaacttaagtcttggagtgatagttaagagggtaaaatttcaacaaaaatacgtaacaaaactgattcttaacagatttcttaccacccaactcctactactttttttgtgttttttgtttgtttgttttttgagtcttgctctgtagcccaggatggagtgccatggtgtgatctcagctcactgcaacctccacctcccaggttcaagcgattctcctgcctcagcctcccgagtagctgcgactacaggcacgccaccatgcccagctaatttttgtatttttagcagagatgaggtttcaccatgttggctagattgagttctgatctcgaactcctgacctcaagtgacccacctgcttcggctacccaaaatgctggcattccaggtgtgggcgaccatgcttggcccacctcctactttttaaaagctactgtctagataatagatataactgtattcctaacatatgctagttctttaagtagcttatagcataaagttttgtgaacactaaacaaactaaacacaagttaaaaaaaaaaagcacataaactaaattcacttcaagagacatgcataacacgttttagcaaaggtacatttcatatccattacattaactaatggggggggaggaaaagcttatctatttctgccagtactagaagggatggtatacatcaccttcctctccctcctaatatttcaaattcatttctcttttaggtaagtagacttctaatccagtttggaacaaataaattttcgatgtcttgtttttgtttcaatgatcttaattaaaatatattcaaattattttaaaatgttgtgtaaataaacaagaggctaatctgacaaaattttcatactaagatattaagagcactttaaataaatctacatgtactctttgccttggtcttattagtagataaaggacattgttacttcacataatacacagacttgtttacccactccaacacataggtgcttgttaaatgactatttggggcactagtaagcttgaagaactccggccagaagtgaagagcagcagcaaagagccatttacagccagactctaaaagtgaacaatttactcaaacaatagaggcatttattggatttaaaacactagtcaaaataaagcccacaatttaaagaaattctatgtggtttcctactgaagtttctagcagttgtgatgtcttcaaattctcatttaagattttatttagagttaagtcacatgagagatactttcaatgttgtcatctcaatacaaacctgcatacggcatttcactaaatccaggggaaccacagcagtgtgtgtcagaccacaacttaakaccccaccaaagccacacagtgcataatacttcgcggagccaaattcacaactgtactctgtagtaagagaagacacaccatgcattttaatataaaactcatgttactggtcataaacttacctcctggacagttaggtttccacacagcttgttagatgactatatcttataacttaacagtcagtcatgcttcaatatgctctagtccagcatgcaaaacaaacctgcattctgcatttaaccagatctagaggaaccaatgctgtatgtgttgtgccacagctaataattcctccaagtccacaaaggataaagaatctgccagatccatagtcacagctatactgctctgtttgattggaaaaaaaaaaatcaagtaagtatttcttcagagatgactaaggccactggaatgaaagaaaatgtttccctgtgagatactattatcacagctgaatagctttggccacaattaagtggcttaaaaaaaaattcactgccaaattcagatcatttaaaaattatgagggttctgtatctgatactattaatagctcgtattctgccatattaatttttttaaaagttttctacattaacggcttttacaattaaagtcaaacttcaaattattaaccactggtaagagcacacttcagagtacaaacgaaactcagaaagatcactcgacatgtaaaaggcttgcaaacaacttcaaagtttatcccagccactaaccaatactatccccacttaagaactcctgtaacataaaaacggatacgcacaaattcctgcagtcaaatacatttaatacacaaataatgttagctttaacttttaaactgaacgacagatagtgtaaataaggactctatccatactaaagacaacagaagcacatgaatgatttaaagaaaaaaatctttcgattttacaggcacaaggtagataacattcttaggactcctacaattcggttttcaggtttctctgtatgtacatacttcactaggatttaaaacacacacaactaagttaaagctgggcccaaccaccaagaatcccaagagataatcacaccaaagggacgcccaccaattatctcctttctattgcctatgtagggctgcaagctgcctcctccagtcgcacgaaaacaggacatctagttatctcatatacaattaagtgcaaaaatgactgacctggcgtcgacaaatataaaacttaggaaaggactatttttaagaaaactaagggcaaatcaaaggacaggtaatatagttagtagaactgtgggtggtcagtagtttcgggaggagagtttacccagtacttagtttgctgaccaagcgagctcacggcggagaaagagctagtcacggcctctcttccctcgggcacacggaggtcacgaagggacacagggcctcagcgcttccacgcccttgagggaaggccaaggatctgacacccgcctatggtggaaaaggccgataccccagggcaagcaactgggcgccgtcctacggtgcagcgggctggactcgtccttccctgtcctccaagccgggtccaggcctcaaaggctgggcggcccacaagtagaccacacgactgtattgggcagggtctgatctcaccttccacggcggcggctgccaggttgcgagggcggcggggctggcccgtgggccctggggagctgctgcggaggtccccgagaccatcgtgcaccagctgcagatgtggcgtgttgaaggggttcgcccgcgccaggtgcgccacggacgagaacatctttctaggggaggagggagcgacggttagaggacaggcaaggcgccggttaacgttaccggcgccctggaaccccaaccggggccttttccttcccgtctccacgcccttgaagaggtcacggcggccttcgaaagaggctgctcccggctgggcccaccgccaaagcagcggccccacaggagctctgggctccgctccccacacccgccacaggagaaggcccggccacactcactccctaagatggcgatcacacaaccactcccttggaaaggttgcggctcacagaggccggacgtcctccgggtyctaagatgtgtgcccttcgcgcgtcgtcggcgtgacgcacacagcgcgccactgcaagtacgcgtcgcccattggtggagaagagcgccgagcccgtagcgtcatcgcgttctcctagcaaccttattcccgcccctgcccgccccagctcttccgcccggcttgtgcgcgggaggattcgttctgcgcaggcgcgcgttccgggtctatattttttgagaggggtcgggctcgagctcttaccctgctcgctttgtcccttcaccttcaggtgtctctccttgaccacgggcttcagttcgcttcacttaagtgaatcacagtatctagtagtcacttaaaaaacaaaacaaaacgcgaatgcttgataatatatttaggtgttggagttacaacatcactgcagtactttgtgtcacaacttctgccattacagtactttttaaaataagttccatccattgacattaaacataggtatgtctgtatttttcatcagactcctggagaatattttaaaaagaaatgtgcagcaagaagtcttacgacagcttgccgcgttatcacagtaatctacagaacacgttgaaacattgaactcctgagatgttacagcgatgaactactgaaagtgactgatagcagattgtgcgtgtgtgtggttaatacatttaggaagctttcattagattcagctcaacagggaggggcgtagtttagttggggagagtttaatagggattcaacctgttagacttctgactcttatattttccaagctcttgacaaagtaaccttgggaatttacttcatctctgtgtacctgttccctagatgtaagataggggtgggactggcctcataggttcacactggtacagtcacacatggccttacacttcatttaatgctctgctgtcattttgattttttttttttttcttttgagatggagtcttgctctgtcgcccaggctggagtgcagtggggcgatctcagctcaccgcaacctccgcctcccgggttcaagcgattctcctgtctcagcccccggagtagctgggactacaggcgtgcacaaccacgcccggctaagttttctatttttagtagagacagagtttcgtcacgttggccagtctggtctcgaactcctgagctcaggtgatccgcccacctcggcctcccaatgtgctgggattacaggcctgagccaccatgcccggcttgaaattcttaatacatgtatgaacaaggggccacgctttttttagtttgcactggaccctgcaaatcaggtgtctggttctggatgggagtaatacttaccttgcagagtctatgagaactcaatgagataatgtctaaaagtctacagaagatgttagcctaaaaaaagttagcattggccgggcgaggtggctcacgcctgtaatcccagcactttgggaggccgaggcgggcagatcacggggtcaggagatcgagaccatcctgtttaacacggtgaaaccccgtctctactaaaaatacaaaaaattagccgggcgaggtggcgggcgcctgtagtcccagctactgaggagactgaggcaggagaatggcgtgaacccaggaggcagagcttgcagtgagccgagatcatgccactgcactccagcctgggcgacagagcaagactccgtctcaaaaaaaaaaaaaaacaaaaaaacaaaagttagcattgaggctgcggcatcacggcactctctaagcaaccctatcccagacccagcccttctggcccaactaaagtcctacagtcccaggaagaattccagagtggagggcacaggaagggaagtagtgacagataaagttaaaaaagtacactagcacctgattgtccagggcctcacataccagactgaggagtctgatcttatgtagacagaggtagtcactgaagggtctggactttctctctctcttttttggttaattcaactttatggtgcttttctaatttaaaaatcctttgtcatgaaaaagtcaaatattatgtaaaaatatatgactgtagtgaatcttcctattcccttcccccagcaccgggtaataccgtgaccctttgctgcacattttttcagctggaacagctggtacccttcaccatggggctgcacatgctcgtggcccagaactcacagaagttgatctagaagatacagtggtaactgaaggagctgcaggcccagctcctaccccatgtgggagctggtgaccttcagaatgtaatgactgttgctccacttctgccttccaaactgcacacatttctcttatagctagccctaacccaaaactatgcagggaaaggaatctaggaaatgtggttctagcctagctaagttgacatggtaaaaaaaacaccactgggctttgcaggcaccgctgctgccaggagccctgtgctatcagccatggtcaaccccaccgtgttctttgacacggagcccttgggccgcatctcctttgagctgtttgcagacaagtttccaaagacagcaggaaactttcatgctctgagcactggagagaaaggatttggctataagggttcctgctttcacagaattgttccagggtttatgtgtcagggtggagacttcacatgccatgatggcactggtggcaagtccatctacagggagaaatttgatgacaagaacttcatccggaagcatacagtttctggcatcttgtccatggcaaatgctggacccaacgcaaacagttcccagtttttcatctgtgctgccaagactgagtggttggatggcaagcatgtggtcttcagcaaggtgaaagaaggcatgaatattgtggagaccatggagtgctttgggtccaggaatggcaagaccagtaagaagatcaccattgctgactgtgggcaactctaataagtttgacttgtgttttatcttaaccaccagaccattccttctgtagctcasgagagcaccctccaccccatttgctcgcagtatcctagaatctttgtgctctcactgcagttccctttgggttctatgttttccttgttcctttccatgcctagctagattgcagagttaagtttatgattatgaaataaaaactaattmacaacagcaacaaaaaaagtaccagagtctatcggttgtcaacatggcatcaatgaacacctcttgtaatcatatttaacttccagacaaaaactaaagagcaaaatcagacttctacctaacatgaagcagctgtcccttggacaattgtgaacaagctaattctacccaaaagaggatacaaaatccttttatccgtctttaggtgatgttattgcagcaggtatggactaagacaagggggttggcctccttaacattcaagaggctctcggcctccaacctgacacaagtagggaaattgcctgaaggaccataactctccactgtggagattcaaatctgcctcccgggttcaagcaattctcctgcctcagcctccggagtagctgggattacaggcacgcgccaccatgcccggctaattttgtatttttagtagagatggggtttctccatgttggtcagtctggtctcgaactcccaacctcaggtgatccacctgcctcggcctcccaaagtggacagtaggttttaagaagaatcagcagatcccgccaggcaaccacctcaggtgaggccattacagatttcacagggacgaggaacataacctcctcagacaggagaggaagggcttctttgactgacaaggaggctcaacagaatttaggggttctggctgggcatggtggctcacgcctataatcccagaactttgggaagccgaggtaggtggatctcttgagtccaggagttaaaaaccagcctggacaacatggtgaaaccctgtctcttaaaaaaaaaaaaaaaaaaaagccaggcatagtggcatgcccctgcagtcccagctacgcaagaggctgaggagggaggatcacttgagcctgggaagcagaggtagcagtgagccgagatcgcgccattgtactccagcctaagcaacagttagagatcttgtctcaaaaaagaaaaaaaaaaagaatatgggggttcatggtcctagtggaatcataatctgcccaggtgtcactattccaaaattttgggtctcaaaacattgccctaactttaaacactatgagattgggaattcaatttgcattgtaattcagaattagattttgagtttgatttttagaaagtacagtcttgcagatacagcaaagcagtcaaggcgaccaggtgcggtggctcatgcctgtaatctcagcactttgggaggccaaggtggacgatcacgaggtcaggagttcaagaccagcctggccaagatggtgaaaccctgtctctactaaaaatacaaaaattagctgggcgtggtggcgcgcggctgtggtaccagctactcaggaggctgaggcaggagaatcgcttgaagccaggaggctggcagaggttgcagtgagccgagatcacactatcacactccagcctgggcaacagagcgagactccatctcaaaaaacaaacaaagcagtcaaggctttctggtcctttatctgatgttgaactgagaagttaaagccctaagttatcattttctttcccccagttatccaacataattagaagaagcaaaccaatccaaagcatctgcttggtcaacccaacaccttgctttcttttttttatttttatttcttttttgagatggagtctcgcactgtcgcccaggctggagtgcagtagcacgatcttggctcactgcaagctccacctcacaggttcacgccattctcctgccttggcctcccgagtagctgggactacaggcgcccatcacaatgcccggctgattttttttgtatttttagtagatacagggtttcaccatgttagccaggatggtctcgatctcctgaccgcgtgatccgcccgcctcagcctcccagagtgctgggattacaggcgtgagccactgcgccaggccagccttgccttctttaggcacttgattacaggtaataatttagggcattgtttttgctaatgcatgccatagacaacagtgttgcctttctcactgactaaagcttgtatgattaccttcctgtatttgcaaggctgtactttctgaaagccaaactcaacatctaactgagttacaatgcaaaatgaatttccaatctcatagggtctcctgttaaagttggggcattttttggagtgaaggtaaaatcccaaattttggaaaaaggacacatgggcaaattatgatgacatcaggatcatgaatccctaaattctgttgagaattttttgccagtaaaaacagcccttctttcttttatgtatgttttattttttgagacggagtcttgctctctcgcccaggctggagtgcagtggcatgatctcagctcagtgcaacctctgcctcccaggttcaagcgattctcctgcctcagcctctagagtagctggaattacaggtgcgcgccaacacgcccagctaatttttgtagagacgaagttttgccgtgtaggccaggctggtctcaaacagactcctggcctttagtgatccgcccaccttggcctccccaagtgctggggttacaggcgtgagccaccacacccggccagcccttccttctttgactggggaggttagtctctgctttgttaaacctttaatggcctccccttaggtagttgtcttgcaaggtgtttaaatataatcagatcagagaaccaatccagacaacggagaacaaattcagggaacccattcttaaagctttgttctcctggaattgtttccaataccattgtctgtttcagcgtttgaccagagaagtatgagcagtataagtcatgtggaataagagatttttttttttttttaggggttaagtctcatgaaattgtgagcatgggaaaaggtctatgaaggagtctaacatctctgtgtctggtattggtcttgaaatttctgtaaatcagtactgcttaccattaggcagaaaagctagagtgaacatgggcaggaacaaactggagcccacaaagagaatctggatcccatggggataaactagactgagcatctgtctcttatcacttacacctcaatgaggcaggtgcctgcagtagcctggtgcaggtgcttataggagccatgcgctgcacctgcgtctcacccagacttgcagaaacaagaatattcagtaggaactgcaagagctctagacttagctactcctcgcaccagggtgagccagcagatgagcagcaatgtgcgtgagatgtgcctagtgtcctagactgaccttcagactgtaatggctgctgcttcacttctgcctttcctatcttcacagatttcccttgtggctaatcctaaccaagaatcatatttgagagataaagtcaaggttgttagaatttgagatgttaggacattcaagtggaactttgccaacagacgtgtaaacttagagctagaggtcaaggatgcacttgtagattttttttttttttcagacggagtttctacccttgttgcccaggctggagtgcaatggtgcaatctcggctcactgcaacctctgcctcctgggttcaagtgattctcctctctcagcctcccgagtagctggaattacaggcatgcaccaccacgctcggctaatttttgtatttttagtagagacagggtttcaccatattggccaggctggtctcgaactcctgacctcaggtgatccacccacctccacctcccaaagtgctggaattacaagcatgagccactgcgctcggccacacttgtagatataaggatcatttctaacatggagaataacaagaaaatccttaaataattcctggtatagctctagtaaattatgcaaggtagaccaaagcccctcatgataacccttttcatatctaccctgagagaaaaaatgagtaatatccactaacaccttggttattgtcttttttgattaggaatcttggtgttttttttttttttttttttttttgagactgagtctcgctctgtcacccaggctggagtgcaatggggtaatctcagctcactgcaacctctacctcctaggttcaagggattctcctgcctcagcctcccaagtagctgggattacaagcgtgggctaccacacccagctaattttttgtatttctagtagagatggggtttcaccatgttggctaggctgctctcgaactcctgagctcaagtgatccaccctcctcggcctccaaaagtgctgggattacagtcatgagagaccgtgttcggcctgttttttgtttgtttgtttgtttgttttttgagatggaattttgctctttcgctgaggctggagtgaagtggcacgatcttggctcactgcaacctccgcccccaggttcaagcgattctcctgcctcagcctcccgagtagctgggatcataggcatgtgccaacatgcccggctaattttgtatttttagtagagacagggtttagccatgttggccaggctggtcttgaactccttacctcaggtgatctgcctgccttggcctcccaaaatgctgggattacaggcgtcagccactgagcccagcctttttttttttttttttttctttttaatggggccataatttccattctggacagtgttagaaagacaaaatgcccctatcctttttttgaagggtatcctaagttcagccttgagagcagacccagctctggggctgaggttcagactcttgaattcatccatgtttgtgcaaggggttgaaagcaatgaagttattcttgcatattcagggacattgtattttttatttattttattttgttttgttttgagatggagtttcactccttttgtccaggctggagtgcagtggcatgatctcggctcactgcaacctctgcctcccgagttcaagcgattttcctgcctcagcctcctgagtagctgggattacaggcacccaccaccatggctggctaattttttgtatttttagtagagatggggttttgccatgttggccaggttggtcttgaactcctgacctcaggtgatccacccagctcagcttcctaaagtgctggattacaggcatgagccacagcacccagcggacattgtattttataggaaataataggcatgtgaattcttttgcccagtttcttccttcttaatatcttgaaatcttctttctgccattgcagtcatagaatagtgtttgtccgctagtggggaagcatctctagatatggcagaccctaaaatagtccctacagaaggtatatgcatatgtggcaactttagtcactcagtgattataatccataaggttaagagagcttttgagtgaggcatggccatcacaagtgaaggttcccaaatctgatttctcattaaagcgcctgccaagacacagatggttttaggcttcaaaagattctgttttactaaggctgatgaagtgtcctggaatctgccatttttaaaagatccccaggcaaagctggacgtggtggctcatgcctgtaattccagctctttgggaggctgaggcaggtggatcacctgaggtcaagagttcaagaccagcctggccaacatggtgaaatcctgtctttactaaaaatacaaaaattagctaggcacggtggtgtgtgcctgtaatcccagctacttgggaggctgaggcgaagaatcacttgaacctgggaggcggaggttgtagtgagctgagatcacatcattgcactccagccttggccacaagagcaagactccatactccatttcagaaaaataaaaataaaaaaaaaaagatccccaggcaaaagatcacagatcttataatcaaccatgttttgagaccaatgatctaaggaattccaagatcagcatgagtgacatagcatgtggaacgagtttgagaggggtgtctctcctgtaaaacgagacagcagtttaaattacccagtttgccataaatataaaaagtgctcagtttaaaa

SEQ ID NO: 93494 - DNA, 12504 bp, Homo sapiens
gatggctgaacatacatatttaataagatataggagtcatgaatatttatgaaaggagaaacacatgtgcaagtgtgcttcatgtcccttcatgggtcccatgtacaaaaacatggcagtatcagcctgattcaagggtggagttttcagccttctgatatcaaaaggtgacatgaagatgcagaaacctttattgagcattctccatggactgaccagaccatggaggtctcttatcaggtaaaaaagaaggagcagcctcaggtggttataggtgatatcagtgtggagtcttttgaaagggctggtttctgtttagcccttagggaagaaaatctaattgtagttagtgatgaagggagcgttaacaatgaggtgcatcagaccccctatcccatcatggccaagcattctgttttcaaggtgactctgcattcccttggccaggaggtggtccattcagccagttgggygggggtgggggggcacttagaattttattcatatttctagataggattggccacatttgtgggaaaggcataaacaccatccagactcttcatttctttcttttttaaaaacaattattattatactttaagttctagggtacatgtgccaacgtgcaggtttgttacatatgtatacatgtgccatgttggtgtgctgcacccattaactcatcatttacattaggtatatctcctaatgctatccctccccccatccccgaccccatgacaggccccagtgtgtgatgttccccaccctgtgtccaagtgttcccattgttcaatacccacctatgagtgagaacatgtggtgtctggttttctgtccttgcaacagtttgctcagaatgatggtttccagcttaatctatgtccctataaaggacatgaactcatccttttttatggctgcatagtattccatggtgtatatgtgccacattttcttaatctagtctatcattgatggacatttgggttgattccaagtctctgctattgtgaatagtgccacaataaacatacgtgtgcatgtgtctttacagcagcatgatttataatcctttgggtatatacccagtaatgggatggctgggtcaaatggtatttctagttctagatccttgaggaatcaccacactgtcttccacaatggttgaactagtttacagtcccaccaacagtgtaaaagtgttcctatttctctacatcctctccagcaactgtcgtttcctgactttttaatgattgccattctaactggtgtgagatggtatctcattgtggttttgatttgcatttctctgatggccagtgatgatgagcctacctccctttattttttgagttggagtcttgctttggcacccagggtggaatgcagtggtgcaatcctggctcactgcaatgtccgcctcccaggttcgagtgattctcctgcttcagcctcctgagtggctgggattacaggcacacgccaccacacctggctaatttttgtatttttagtagagacagggtttcaccgtgttgcccagctggtctcaaactcctggcctcaggtgatctgcctgccttggcctcccaaatggctgggattacaggcgtgagccactgcacctggcccagacccttcatctctactcccctagaaaacaaaaactataagctgccatagggaagtggggagggattactgagaaagttctacctctgagacccaaggacacaggaagcatgaagtaacaagtaactgcagttttcccattaggaggggcaagagtgtggggagagcccctcgaggtgtgagtgcacagagaagaccagaaactgagggtgaggaagaaatattaagaacgacccttgggaggtaattccagggttttgggaggctgaggcagggagattgcttgaggccaggagttcaagatcagcctgggcaacatggcaaggcccagtcctgacaaaaaaaatttaaaaattagccaggtgtggtgatgcacagctgtagtctcagctacttgagaggctaaagtgggaggatcaattgcttgaacccaggagttgaaggctgcagtgagttatgattgcaaccactgcactccagcctgggtgacagagcaagacgttgtctcaaagaaagaaggaagaaagaaaaaaagaaggaaggaaggaaggaagtgttagatatgagttctaaatttattttcaaagaatcaatatgtcagtatgttcaattctttaccttctacttttaaacttaacttccttatagagcaaccttttttgattacctgctccaccctgactcatttcaatcacctgctccaccctgactcattctgattacctgctctgtcataaccatttttcctgccaaagcactcaccccgttattagccaatcagaattagtttagcctgtgcggtctaactctaccaataggggaacaacacagcagcaggggccatgtgggtcacggataagaaccccttcccctcccttgtccaagtgtgcgctcaccattgctctatctgtaagggcgcacccttctatggaagtaccttgccttgctgagaattaaaagaaaattttatatttgagtgcaattggttttgcggcactgaaactttacatataacaggaggaaggaaagaagggatggagggagggagggagaaagaaagacactgaagcaactcaacccccatctgaagcacaaggtaattctagaggaatttgaacctagtgttacactgacggaaaccatggcaataacaaaagccaaacccagattgactcctgactggattgcctcaacttcccattggttgctttccacaaccaatcagacagatttcgggccaccacttggtttacacgagttgaccaccaagtggccaatgggaaacctgtagggagtatttggacccaagaagattctgtatccgggcccttgagcccctatgctcgagcccgctcctgcactgtggagtgtactttcattttcaataaatcccttcattccttccttgctttgtgtgttttgtccaattccttgttcaaggcaccaagaacctggacaccctccaccgatgacactgagaggtgttgcaggaactcccaaatttgtgttgattaatttttgtatttttagtagagatgggatttcgcgatgttgtccaggttggtctccaacttctgacctcaagtgatccacctgcctcagcctcccaaagtaagaccgatgcctcaatgctgtgcctgcaattgcctgttcctgctgtttcagggtagttttgtttgtgtccggttcctgctgtcctccctgccccacacaggaggcctctgtgcaggacacacagccgttcctcgagagccactctgcacctgctgtctgcactagctacagaagggtccagatgagtgtctgcacaggtaggtcttgccgctgaagactaagccttgcaaagcaaaccaggagaaatggattttggtatgttagacaggcaggcagtcttcgtcctagttttgttttgttttttgcttagtaactgctattgcaaccataatattttcatccttctttccttctgaaattgtgcctcaaagagttaaagaaatcagtaactctgggcacagtggctcatgtctgtaatcccagcactttgggaggctgaggcaggaggactgcttgagcccaggagtttaagaccagcctggacaacacagtgagaacccgtctctacataaaataaaaattagctgggcatggtagcgcatgcctgtcatcccagttactcaggaggttggggcaaaaggattgcttgagcccaggagttcaaggctgcagttagtcacgattgcgcaccactgcactccaaccagggtgacagagggagaccctgtctcacaacaacaacaacaacaacaacaacaacaacaataaaaccagtaagtaacagaaattcttgagtttgcaggatagcagataaggaaagaaacaacttgctgaaatgctgaaactcctttcattcgtaagataataaaactggctgaaatcagttggaacgaatgtggccaactagagtctgtgcagaaccagcttgctgacatcacagcctgaatttccatcacgtttcagataactccctctgaatttgcacacgcgaaccataagttagcatgagaagataatcatgaatcctcaaggattctgcccatctccctcttccttccaccaatcacctgctaatccaaccccaaaacttgactaataaaatgactgccttaaagccaggagggagacagatttgagctggatgcatgtctccctgggagtcaacttttcttttttcctttttgttgagagagagtctcactctgtgcccaggctggagtgcagtgaagcgatctctgctcactgcaacctaggttcaggcggttctcctgcctcagcctcctgagtagctggaattgcaggtatccaccaccacacccagctaatttttgtatttttagtgcagacagggtttcatcatgttggccaggttggtctcaaactccagatctcacctggctgacccttttaaactttacctcaaatatatagtggtggatcttttcgatttctgtataaatggattcacactctaaatatcctactatgacttgttttctttctttaacaatatgaataattggccgggcgcgatggctcatacgtgtaatcctagatggttgggaggccaaggcgggcagatcacctgaggtcaggagttccagaccagcctgggcaacatggtgaaaccctgtctctactaaaaatgcaaaaattagccaggcgtggtggtgggcgcctgtaatcccagctgctcgggagattgaggcaggagaatcacttgaacctggggtgtggaggttgcagtgagccaagatcgcaccattgcactctagcctgggcgacagagtgagactccatcttaaaaaaaaaaaaaaaatatatatatatatatatatatatatatatatatatatatatacgtgtatatatatatatatatatacacgtatatatatatacacacatatatatatacgtatatatatacacacacatatatatatatatatatatatatatatatatacataaaattattttgtcctggaggttatattttgttttactgtgacattagtaaagatacagctagtacagaagtcaatgatttcatgaatattattaaatcaaatctttacattaaaaatatgagttggggccaggcgcggtggctcacacctgtaatcccatcactttgggaggctgaggcagatggatcacctgaggtcaggagttcaagaccagcctggccaacatggtgataccctgtctctacaaaaatacaaaaattagccaagcatgatggcaggtgcctgtaatcccagctactcaggaggctgaggcaggagaatcacttgaacctgggaggcagaggttgcagtgagccaagattgtgccattttatatatatatatatatatatgagttggagctgggtgcagtggctcacacttgtaatcccagcactttgggaggccaaggcaggtgggtcacttgaggtcaggagttggagaccagcctggtcaacatggtgaaatcctgactctactaaaaatacaaaaattagccaggtgtggtggcgcatgcctgtaaccccagctactcaggatgctgaggcataagaattgcttgaacccgggaggtggaggttgcagtgagccaagattgtgccactgcaccccagcctgggtgacagagtgagactctgcctcagaaaaaaaatctacatatatatgtatgtgtgtatgtgtgtgtgtgtgtatatatatatatatatataaacaagcacagaagtcaatgatttcatgaatattattaagttaaatctttacattaaaaatataagttgagttttgcacacatcgccactgcctccaggggccccatactatcagctatggtcaaccccacyaagttcttcaatgagccctggggccgcatctcyatccagctgtttgcagacaagtttccaaagacagcagaaaatgtttgtgctctgagcattggagagaaaggatttggttataagggttcctgctttcacagaattattccggggtttatgtgtcacrgtggtgacttcacacaccataatggcagtggtggcaagtacatctatggggagaaatttgatgatgagaacttcatcctgaagcagacaggttctggcatcttgtccaaggaaaatgctggayccaacacaaacggttcccagtttttcatctgcagtgccaagagtgagtggttggatggtgagcatgtgttctttggcaaggtgaaagaaggcatgaatattgtggaggccatggagggttttgggtccaggaatggcaagaccagcaagaagatcaccattgctgactgttgacaactctaataagcttgacttgtgttcgttttgttttgtttttgagacagtttcactcttgccatccagggtggagtgcaatgtcacaatctcagctcactgcaacctctgcctcccaggttcaagtgattctcctgcctcagcctcctgagtagctgggattacaggtgagcaccaccatgcctggctaatttttgtatttttagtagagacggggtttcaccgtgttggccaggctggtcttgaactcctgacctcaggttatccgcccaccttggcttcccaaagtgctgggattacaggcatgtgccactgtgcccagtcgacttgtgttttatcttaacctcaagaccattccttctctagctccggagagcactcctccaccccatttgctcacagtatcctataatctttgtgctctcactgcagttccctttgagctccaagttttccttattcccttccatgcctagctggattgtagagtcaagtttatgattatgaaataaaaactaaataacgacaacaaaaaatatgagttgatttaaataaaaatattaagtaaatattagtataggtggcaagcggatatggcaaaaaaaatcaataaaatttgaatgtgaatggctaaaattcaggaaatatggttttaataaaaacagatacaagctgtggcacgtgcttgtagtcccagctgacgcgcaggagggaggagtgcttgagcccggaarttcagggccagcctgggcaacatagtgagacctcgtctcaacaacaaaaatgaaaaaaatcaacaacaacagaaacacagatacatctaaaattgctctggatctttggaacaggtctgccctgaagtggtgttttatgggcctgggcactctggcacaagccctttctgggcacaaggcgaagttgatgagactcatgcttactgccagcttgctccaggccactttcagccaccagcaccatggccttctgcctccttagtctctgtaccttccctgggatttcccccaggcttgactcttctcccaactcctctgtgcatggcctgaacttgcccttgcaacctggcatggatcaagctggcttcctagtttctgccccccagctccattcacccttgggtactggcctcgcttcatcacctctttctgttatctacaccctttgccacatcactttgcagtgccctgtcaatgtgactctgggctggccatgagacctgtgttgaccaacagaaccaggctgaagtgacagtgcaccagttccagaggccctgagtgtctctataccatcttgtgcatttctgccatctctaagataaggacgaaatcagcaggtcctaggatgagggtaaaatatgtggagcagagttgcctcagccaagcctccaacctccagcagcactccagccctcccacaaactcatgaaaaataagacattattgttttttttcagccattgagctttggagtgtccatgtatcggttagctattgctgcgtatttgttgcacagcaatagctaactgatacatggacacaaagcagcagcccctggcccccacccctgttcagtgactgctgtactcacacacagagtagaaaatgcttgcacaagtgggatcaagcattttcccactttcataaccatgccccatggcgtcgccactgatattgccctgcctagcactggaaagaggaggtagtgagggcaaatggaacctcttttgctcagtccagggagcaataggcagctgtcacccacaaacgacatggctcccacaatctacttcccagatcatagtcctgcctagctgggactggaggtaggatacaagttagaggtgtattccagccccagggtgctgggtgaggcctggggatgtgtccctgcccacaagatagaactggaatcttcacgtccaccagattctgggcctctctcctatgtcacagatgggaattctttccacattattcccagtgggtcttctcactcttttccaggctccttggagktcactgccctgatgacaacatggtcttcccttcaaggaagccacgtttctaagagggctctggcatatgcattggtgagttgaagcttgacagtgttatagcttctctgctgttagtgtgaggtttgaggattttactttaaccacatggattagtcagagaaacagaatgaacaagatacagatggcgctgtagacatagctatagacctggaagaggggctttataatggagattggcctgagtgattaggagcctaagaagtcccacagtatgtcatctgcaggttgaagagccacggaagctgatggtatcattcagtttgagcctgaagttctgagaaccaggagcttcaacgtcccagggcaggagaaggtggatgtcccaggtccagaagagagtgaatttgcttttcctctgtctttttgttctatttgggccctcagtggattgaatgttgcccacctacattggtgagggcagatgttttttactcggtctactgattcgagtaccaatctctttgaaaacaccctcccagatgcacccagaaataatgttgcacctgctatctgggtatcccttaacccagtcaagctgacagctaaaagtaaccatcacaccacactttcacaaacacctgggtgcttgcggactcaccttttacaatggttttaccagcctcctccacaagcacaggcaaagtcagtttcaaggacaggagccccccattgttgctcggtgtactggcgatctaaacaaacacgtgcattatagggggtttctgtcattttttagccacctcgctttcatccctggtcctcatgaccccttgatttctttctgaggaattccctccctcccactgtgagaacagaggggccaggccctccgtctgtctcccagctctaggagagccaggggttgagccccaggccagagctcagccaatcagaggctgtcctgtgagcaagtgataccgggactgatgggatggctggagtgtgtgttgcacagatgcaacagcagcacactgaccagaccatgcccctgtgagagccggggtggggctccactgctccctagggctcccaggagctctgcctgccctcagcttcctgtccaggctctctgaaccccctcttattattttgtttaatttttaattttttttagatgaagtctccctttgttgcccaagctggagtgcaacagtgtgatctcggttcactgcaacctccgcctcctggattcaagtggttctcctgcctcagcctcccaggtagctgggatcacaggcatgcaccaccacgcccggctaatttttgtatttttggtagagacggggtttcaccatgttggccaggctggtctcgaactactgaccttaggtgatccccctgccttggcctcccaaagtgctgggattacaggcgtgagccaccacaccttgctgcaccctctcttgttgatccttcttgcttggttaggcagagacagcctccaattcttgcagctacaaggcccgcacatgaaggacaaaatgttttggttaataatgtcttcatgtgtgtaagtcctgtttttgttttccagttgaattgagagttccttttgggcaggaactcttttttccctttgtcctgggtccggtacttggcatgcagtagattctagggcagagctggaggcagggggaggctgcctagagccagagggcttgtgtgtgaggtccgcccctgcactcactcactgggggaccttggctgagtcccgcggcattttcagtctagacattgcatcaattaaacaggtgtgatgcttataatgatcaccctccttcttggcctcagggcctctgtgaggttttaatgaatgaaggctgaagaaactccacagagatggtgactttcccccagcacagctcttgccctcaaggaagagacactcgaccaaacaggcaactggaaacaggatggcttcgtgggcgtgtgtgacttacacagggctgtgcactcagaagaatcccgtgactgacttaggctctgcagctgccatcttgaaattcttaataacttttgaatggtgttgggggtggggttggaggggatggtccacactttcattttgcactgggcactacaaattatgtgaccggctctgattaaaatgctacaagaactaacatgaaactggacacagaaaccagaccccagagcacataccgtatgagtccattggtatgaagtttaaaaacagatggcactagtccaaaggattggaagttggaatagtggttaccaggactggggggaggaagggatggtggatggtgaacaaaaggaccttggagggctcctggggttctaggaatcaatcttccttctttccttccttccttccttcctctttctctctttctttctgtttttatttcaataggtttttaaggaacaggtggtgttggttacatgaataagttctttagcagtgatttctgatattttggtgcacccattacccgaataaaaatcttctctctttcttcctctctccttccttccttccttccttccttccttccttccttccttccttccttcctaccttctttccttcaacagaatcttattctgttgcccaggctggagtgcagtggtacaattatagctttttgcagcctcaacctcctgggctcaagtgatcttcctgccccagcctcctgagtagccaggactacaggaatgtgccaacatgcctggctaattttaaaaaattttttatagagaagaggtctcactatgttgcccagactagacttgaactccttccctcaagtgatctttctgcatcagtcttccaaagtgctgggattgcaggcatgagccacctcacccagccttagaaatgttctgtttcttgacctgagagctggatatacaggattgctcactttgtgaaaattcgctaaggatttgtgcacttttctgcatatgtgttaaactgcagtacaaggttaaaagaaaatgtgtgaaacgacctatacattgcaaaggaaaggccagggtgttgagcttgacccaccttggggatgctcagagaaggcttccctggagaggggtctgggtcaggtcctgaaggaggagcaagggatgggggttgggaagttttgtggctccctaccaagggatgacgtgcctgtctggcaggagctaggctcatgcatggctcgggagagcacctgcttgtactgagtctggctctgcctgggagcttgaggatgcgaatgaattggagacacaaagaccagcttgtgggggccgtggactccactctctgggctcgagactccagctgcagtgtggaggacagcctggggtgggagatgggaggcagggagaccctgcagaggctactggacttcccaggtgagcagtgatggtgtcttgggctgggggagtgtagacaggagaatggattctggagactttattccagtggtagctgtggtggtcttcacataggatcacaaattccttggcatttgtcccatcaagagatgaagtctaatttcatccctctttttttttttttttttctgaaatggagtcttgctgtcttgctcaggctggagtgcagtggtgcaatctcggctcactgcaacctctgcctcccaggttcaagtgattcttctccctcagcctcctgagtagctgggattacaggcacatgccaccacacccggctaatcttttattttagtagacacggggtttcaccatattggccaggctggttttgaactcctgacctcaggtgatccacctgtctcggcctcccaaagtactgggattacaagcatgagccactgcacccggcttttttttttttttttttttttttgagacagagtctcactctgtcgcccaggctagagtgctggagtgcaatggcgtgatctcagct

SEQ ID NO: 93495 - DNA, 12760 bp, Homo sapiens
gaaatttcttccttcagatgccccaaatcatctttcccaagttcaaaattccacctatctctagggcaggggcaaaatgccaccagtctcttcgcatagcaagagtgacatttactccaatttccaacaagttcctcatctccatctgagaccacctcagcctggtcttcattgtccttatcactatcagcattttggtcaaagccattcaacaagtctctaggaagttccaacattcccatattttcctgtcttcttctgagccctccaaactgttccaacctctgcctgtttccaagttccaaagttgcttccacattttcaggtatcctcatagcagtcccccactaccttggtaccaatttactgtattaattcattctcatgccgctataaagacattcccaacactgggaaatttataaaggaaagaggtttaattgactcacagttctgcagggttttggaggcctcaggaaacttacaatcatggaagaaggggaagctagcacatccttcctcatatggcagcaggaaggaaaagcacaagcaagggaaatgccaaatgcttataaaaccatcagctctcatgagtactcactcactatcacaaaaacttcatgggggaactgccaccataattccatagtctccacctggtcccaccctggacacatggggattattacaattcaagatgagacttggatgggaacactgtcaaaccatatcaaggacataacacaattctggttaattgaagctgagggctctgctgtggggtttttgagaaagagttcctggttgagaagatgagctgtatagaaagaaaagtttctcttctaaatatatgtcatctagtcttcatgggatgcctggaagcactttacctatcacgtaatcataaggagaagcttactgacacactgataagggagagtggaaaatatggatagtgccagcactaggatccctgatgaggtccttgaactgctgagttaaccaaccatggattctgctgacctctgattttcttatcacataagacgataaatggcctattttgagtcacttttagtgggattttccattacttgcagctagaagcatcctaacaggcatagcctgcatttctaatttatactacattttttctttgatatagagtctattcccctccaaatctcatgtgaaaaatggatcccaaatgttggaggtggggtcagccgagtgggaggtatttgagtcatgagagtggatcccttatgaattgctcagtgccatcctcacagtaatgcatgrgttctcaggctattagttactgtaggatctgatttgctaaagagagcctaacacctcttcctcctctctttcttcctctctgtcacacatgtggcatgcttgcttcccttcgctttcaccatgagtgaaatcttcctgaggccccgcagaagcagatgatggtaccatgcttcttgtccagcttgtggaaccgtgggccaaataaacctttttgctttactcagcatcaggtattcctttgtagcaatgcaaaacagactaatacattttcctattttcaaaatccaatcattctcacggtaatgagagtaaatttgatcaattgcctactcctctaaattttattaaagaaacactatgtttatatctcctctcatgacagctagaattttaaaaaaatcttattcatgatagtattttatgaaatcagagtatgaaaaatagaataaatcactagggaaaatgcaataactgtgtcagaaaaaattatcaaataagccatttaaacaagaaaatctgaaaaaattgctaaagaagaaaatcctagaggggtcagagaagtcataattacaaagaacagcaaggtgagaatatcataatagctggaacataaaaggtgctctaatactgaaatggggaactgagaaggattaactacatactttattggtcctcacgtaaagtgaaaagcttggacctcttgttcaaaaacttaagagttttaagacagagacagcagagcactaaaccaatgtggttttaaaagtaccctcagaaagcgtgagccctgagcaactgcatgggttgcatacccatgaagccagcctgacatccaagaattatgatttttccagtccacatataaagattggaatggagtggacatggtaatgaggctattgatacaaagtgaggctgggccccaataggacttccctggacagagtttaatttcagtccagagcaaaacctaaagagactgtgggaagaaaccattctagagttaaccctacaatacacatcttcatatttcagatgaaaataataatacggaatgttatttaaataacagggaaatgcttaatgcataattttttgttttattttattatttttttttttggagactgagtcttactccaggctggagtgcagtggtgcaatcttggctcactgcaacctccctctccctgttcaagcgattcacctgcctcaaccttccaagtaactgggactacaggcacatgctaccatgtccggctaaattttgtatctttagtagagatggagtttcatcatattgaccaggctggtctcggactcttgaactcaagtgatccgtccacctcagcctgccaaagttctgggtgtgagccactgtgcccaaccttaatgtataatgttaataaagatagttgtacataaaattatgtgcatatagatgtacatgtggggtatatatacagacttaaaggaagtacttcaaaacatatcatgtatattactagatgctatagtaaagtaccaaaaactgagaggcttaaataatagaaatttattgtctcacacttctggaagccagaagtccaaaatcaatgtactgggaaagttggtttcttctgatggctgtgagagaaggatctgtttctggcatctctctttagcttgcagaaacctgtcttcatgttcacatggcattttccctttatgcatgcctctttctaattatctttttaaaaataaggacaccagttgtgatattagggccaatccactgacctcatctaaccttgattatctctgtaaagactctatctccaaataaggtcatattctaaggtactgggggttaggaatttaacgtataaattctggtgtgggagaggaaatatttagcccatataataggttaactctatggtggaatatcatattttctttatatattttcatagtttctaaagctcagttttataatcagaaaaaataggaaaacatgagtttaataatactctataggctgaagaaaacgacaacaatgagatactggactgatagaagagtcttgggaaaataacatttgaggcataagagatgtctatatcatgcaggaaaaatcatacttgctcagcctacgtaagtagaacctcagagtaaaggatttttactgaaataatgtcacacccttaaaaataatgatcccaactctcaacctttaccatttcccacacaacttcccttcctataatattgatttaggattccagctctacatacaaaactacaccaaacactcatccattccagtttcagcaacccaaactaagtgcatccaacaaattctaagggacagcctcaaactctgtttagactaaaactgacaggacccacatccattcagaattatatcttattctttactatgttttactagtctgataagcctatattttcacagcactttttcactttggagctgtagattcataataactactctgcaggattgttgcaaaaacaatatcaattatcattatttccatgttttattcatcctgtcaaattcatttttattcagaacctacaatgtgaacaagacaatacaggacatatttgtttatgaggttttgagtgaggcaacctgtgacgatagtcaaggcagtggctcaaatgttagcgaaactaagtaagttttactctattccatttatacaaactcaatacctcaatccccttttgaccatgtggaatcttaaggaaaccaacaacatgacccaagaacataagatgctctgtcagctcactttataagctctaggaagaattaagcacacacacgtaaagataccagatatatgaagtttcaaccaatatcaagatcactaaaaagcattttggatacatttcaaaggaagtaacaagaatatgttacccatcaaaatcaaaacacttagccatcactaaaatttcataagacaaattggagctgccaaaatctagaaatttcattcacttcatggatgaatatagtgtttgcattcctgcttcacttaacaaaaacaaaaatatagatggaaattataaacacaaagttagactcttctaagagcttaattgctcaacattatgattttctagatattatcatatattttaactgacattaacaacagtttacttcaaattgtaattcataatacaaagcagcaattatagttttaggtatcatgtattaaatcatatcttgacaaatggcagacttgtttatttgtttgccattatgaaagattatgtttgcttattattttttttacaaatatgagaataggagatacaatgtatattcttcatagcaatgtggtaataaagaggttgaggtgtctcctatatagatcttcaatatttataaattcaaaaaatgctattgtcttcagtctgaagttggctgacatattcattttgaatcaatataatttacttttcaatgaggtttaagtggctaccatgtataaagcactgttaaatattctgcatgacttaaaaatacacagtcagtctccattcttcaataaaatcataatctaagaccatgaataagatacagggaatttacgtgaccagataatataattggtatgccattgttgcgaataaataagaagatttaaatgatggcgagcacttctccatacagtgcgattgagaaaaccttcacacagtcctaggtgacactgattttcaattcctaacaaatggaatatttttagccaattcacagggggagcaaagtacaaaagtgtttgagaaaacaccagaattatacttgaactagaaggaaaggaggctaaaaattaggaaaaccaaaatcacgggataggaaaatgagagagaaagtgaaaggccaaggaatggtcaaagcaaaagtagacaaacacacacacacaaaatgtgtctaccctgagcaatctttgttctaatatttggtatatttgtgtcttggttttcaagtgaaactggggctggtcggaagaaatactgttgacaattacttatgcctaatgttttttgaaaaacaaggaatccacatgtagatacacaaaacttctccacaggtatcttcctcagaggacacagatttctgaaatttaaaaaactgtgattgctttattctctaataaaaacattccataacaaaacaacattttattggtcatcttggtgaaaatgagtatactagtcatttgtttttagaaatgggattttgatctgtatgataaacaagagataataattgaaatagcataagttaaaacatctgctcacttttattagctctgattttagagggaaaatcttacatctaatcttctagacttaaaataagattttcagaattttaattatgtcctctctctctctctcacatacacacacacacacacacacacacacacacacacacacacagagagagagagagagacagagagagagagaaagtacttctgttgccattaatttgttttagagatgaacggggcttaagaaatttaacacaaataaagtaagcagttaagttacaatgaaggatacaaaatgttcacacttctttactgtactacatttaaatcaatgtgacaaagtcattttgtctttatgcaaacaatcaacttggtattttcgtatagtaacagaaaaaatgggctttgcagacgccgctgccaccgggagccctctactatcagccatggtcaaccccaccgtgttcctcgacatcgctgtccacggtgagcccttgggtggtatccccttcgagctgtttgcagacaagatcccaaagacaccagaaaactttcatgctctaagcactggagaaaaaggatttggttataagggttcctgctttcacagaattattcccggggttatgtgtcagygtggtgacttcacaagtcataatggcactggtggcaagtccatccaaggggagaaatttgatgacaagaacttcatcctaaagcacgcaggtcctggcatcttgtccatggcaaatactggacccaacacaaacagtttccagtgtttcatctgcactgccaasgctgagtggttggatggcaagcatgtggtctttggcaaggtgaaagaaggcataaatattgtcgaggccatggagcgctttgggtccaggaatggcaagaccagcaagaagatcaccatttctgactgtggaaaactctaatacgtttgacttgtgtttgatattttatcttaaccaccagactattccttctgtagctcaggagagcacctctccaccccatttgctcgcagtatcctggaatctttgtgctctcgctgcagttccctttgggtgccatgttttccttgttcccttccatgtctagctggattgcaaagttaagtttatgactatgaaataaaaactaaataacaataaaaaagaatggtagaaatgattggtaattgactagggactttagaaaaatgtttaaactctgtaacatttcgttctttatcttgcattcttattagatatcacttctaccagatatcattaacagaattaaggataaaaatcatatgaccttatattcctaatactctttataccaaattagttacttagaaagagctctatgaccttgggaagttatgtaagttttctgagccttggttttcctatttgcaaagaaaaagcaatactatttaaatgagccattccatgtatcattgcatgattctgaatttccatattttatcttccttctatgaaaaatgacaatctcagttgctccttttagtatcagattgtgccattttatacattatgataattaaagtaatgatcagggactagattttcaagtgcacattttggtttgaatacatttctcagtcctccccttctggcttggtaggatgcaccagcccactcatgccagccactgaggttaggatgcattctgcctgtgaagatcccagattttcacatcacattggctttatcagcttccacagctgctggagagtgcaaggtcctaagaggctctaagagacacttagacacctgtcaaaccaggtgcactggggcagcaactgcccactaaacatccaggctggcatgcagccaactccttctctaccctaataattttttttaaaggccaatgtgatcacatttaaataacacaacgctttcccagagagaaatttttacaggcactgaaaagagagaaaagtgtgctttttaaaaaatctgaagcaaagttaggacagaatccagaaatgaagcttactcagccagttctgaaatgtaacctgcttgttaatcattaatgagatgttaaatttatgaaatcttgaagtgaaacacaagactaagattttggcatcaggtttcatttgaatcaactttctggagaaaaaaaacagctcagtaagttgaactgcaggctgcgggggctaccccagggcatcagcgttgtgctgtaaaatcacactatatcatcagcacacatgtgcacaagggagaaaacacattagactgtaagataatcgtcaagcagagaaaataaaatatgccctcaggcgtcccatttgtaattcccttgaatccatgttcacaaggctttcttttctatacaatttgacaagttaatgcaaaccactttatgtagtcactacaacgccccaaatccctgaagttttgtagggataatttatggtcagctaaagcaaatgccttagagaagtcaatagaaattgcttctatcacacagtcttcatctattgcattggagatagtgtgggtaccagatcctgggtgattggtttgctgtgaagcctgacaagaaaggagtcagcaagtcctttggctgtagatagtttgaaatgtgtacgtgtacattttttttaacaggtagagccaaaatagctttctgctgaatcaaacctcttaatttcctttttgtggaggtgaactatactgacaatgtcttcagacttgaatgaagggaagacctcagaacggagatattttctttgctattaccagaattggcaagtgaagaaatgcaggctcttcacagatactgtatcacaatttagtattcaccaggaaataattccaaattttccaatgcataaatgaatctctctcagtaaaaatccacattaatccctctgagtgcatttatttgtttgaaggcaaagccctcaccaccatcaccaaaagacattggtataaatgataatgacattaagaatctggtgtttgtcagtcttactgttttaaatctttacagttgaaatggttatagttaagtattttaaaataattttcacatatatgtatgtgtgaataaggtatatatatatatatatattatataatattaggaattatctccattctcagaaaaaaatccagatgtttccagagattaatttcctagttttttatatatgtatatatttcatatatatattttaactatatattattaaagagcaggcagattacaaaatatttctcaaagaacaatataacatttttaaattttattttttatttgttcgttttaatctgagtgtttctctctttgactctgtagtacctctggtctaccagcacaggagaattgaaagtagggtggcctaccattcaagaaagagtactggctaggttctctaacttatccaaaacatataacaatcttgtcctctacacatctatcatgtatagattctatcatgtgtattggctctcaaataaggggaaatatttttgtaatagtcaatgtttggtcatgaaaatagaagctattttattattccaagtatgaaggatttcaatagaagaaactaaaagtttttcaaaaccattgtatggatcggagagtaaagaaagggaagctctcaccaatatttccagcctatggcactaaagtagatggttcttaaaaattcctccagaagtcactgaaatctcaagaactgctgagtggcttccactgactatttgaatctgcaataccaaggagaacaattctccagaagtcaccatgagctatctaagctatacaaagcctaaagcaggtgagatgtaggatgttgtcagcaagctgctgtgaacttcttgtctgtcatctgcccacacccttggcttcaaaggcttctgaagaataatcctcttttttcttctaccttccaaatctcagtttagttcatctcattgtcagactgtgacctaaaccatggggcaaagatagattgaagaaatgcatattcaggctttctttctgtaatagaagttaatagtgattaattttataatacactaatcagatgtgtgttacaactgaaaaatatcagcaatgcaattttaaaaactttattaaaacaaatcacatttgtgtatgattaataaaatgttaggcagtcacttaagtcatggctttcatctttacaagaagaaaaagccgaaccaaccaaaaatatactacttttcttggactcttcagagaagtgaggtccctgggaaaattactccttcaaaatctgaaaagacaggtgaatctgaagaattacagctagatttgcttatctggagcagaagctacggaagccataagcctgtaggaacacataaatgttaattctgatgagtaactacaggcagagtgaagacttgtatgatgggagaaacacctgaggatgcggtcttgaggggccccacacttccatgagggcctcaccatgttgtccagtaaagagctgggaacgttcctttcatgaacccgattgggggcaaggaagaataatcactgtgaaatatactaagcaggccgggcatggtggttcacgcctgtaatcccagtactttgggagaccgagcaggtggatcatttgaggtcaggagttcgagaccagcctgacctatgtggtgaaaccccatctatactaaaaataaaaataaaaataaattagccaggcatggtagtggacgcctgtagtcccagctactggggaggctgagacaggagaatcgcttgaacccggaaggcagcagttgcagtgagccaagatcatgccactgcactccatcctgagcgacagagcaagactccatctcaataaaataaaataaaataaaattttatatatatacacatatatatacatatatacacacacacacacacacacacacacacacacatatatatatatatatagagagagagagaggacattcttcctaaagggctttataatctaaaaacaaaaaagactttaccagagccttttcccacttggcggaagggcatagttttcccactatagtcccttctagccttcctatttcacctaaggaaggaaaataaaagctaagacatgtttgtgaaagttaagagttcagagatacctatctcctaaaacactgagatcaaatcacaaaatggtgaaacgtgtcccctcctccgtgatttagcaccacatcaacagaggatatataacaaaggattatagctgaaagagttgcaagatccaaactcttaggaggagcagctaaggaattccgaagtcaacaggagatacgaaaataggacacaagaggaatttgaaacccccggcacctataaatgcagcaaacattaagcacagcctaaattctgatcagattaacataaagtctcatgttaaaagccaattaggccaggcacactggctcacatctttagtctccacaactaaggagactgaggctgggagaacacttgaggccaagagttccagaccagcctgcagcctgggcaacatagtgaaaccccctctctaaaataaataaataaataaataaataaaaataaaatttgccaggcatgatggcatgtgtctatagtcaggtacttaggagactgaggcaggaggatcaattgagtccagggatttgaggctgtagtgagctacagttgtgccactacactccagcctgggatactaagtgagaccctgtcccaaagaaaaaaaaaagccaatttatctcaatttctcttacttgatacattatgcccggccttcatcaaaaatattaaaagacatgctaaaaggcaaaaaataaaatagtttgaaaagacaaagatagcatcagaatcaaactcagcagtaacacaattttggaattatgagagaatttaagacaactatgattaatatgtaagacctctaatggaaatgaaagcaatgtgaagaaacagaagggtaatgtaaggctcattgtagactggtcatgccacaagaaagaatcagtggtattgaatataggtcaatagaagcttcccaaactacaaagagaagaaatgaagggaggaagagagagaaagagagaaaaagagatttcaagactagtaggacgatttcaaaggtataacatacatgtagttggaataccagaaggagaagagagaatggagaagaataaatagttaaagtaataatgactgaaaagtttccaaaattaataaaagacactaaaacatcttggttgcttccagtttgggacaattattaataaaactgctatacattttcacattctagtttttgtgtggatatcagtttctaccatgttcagttttgtaagaaattgcccaaatgttttccaaaatggttgaagataattgagatatttatataacgtatagttattttgtttttatattgtaaatcatctggaattttatttacatattcagggtgcgtacatatgcacaactttattacagatttttaaatatctgattgattcttactttattgtatcaacaatattaaatagtcttcctcacctccaactttctcattttaaaattttggtatgtgtagacacagtcccaggtgtgacttattttgccagtacatttgttttacagatcaaaatggagttttaatcagaatttccccttttatataaataagatgaaatggtttcttctacattctaagtctactgtgtttgctttttcatttcttttgaaatttatggaagttaacatactatattttccttccttcaatcaccctccagtttcatagatattttggtaaactctatagcgaatttaattctgcaagatgtcaagaattctttcaggatagccccagtatccataatttcttctcgacaatttaccccaaattttaccacctttaactttcccctcaccacctcaagcatctagaagttttctccatatattaaaaaaaaagaagtgccatatagttttcttatagcaggaaagctataagaaatactatatccttcagaaaagcagacaagtaattagctcatccaattttattcataacaagaagataaatagtacgaacatcaattttattcctcactaaagttgtagcttagagagatata

SEQ ID NO: 93496 - DNA, 145177 bp, Homo sapiens
ggattcacatccccctaacctgctttatttgtctccttagaacttgacatcatccatcctaccatattttacttacctattttgtatatttcatcttgctaccctaaacccacctcaaatgccagcaatgtgagattaagatgtttttctgttttcattacttcctcctcagctttgaaacagttcttgacttgttacaggtccttaaagtatacttgttgactgaaagaaggaagacatgaatgaatgagggcgcaagcctggtaattggttccatctccatggggaagagtaaggggtgtttcaaaatgacatgagtgttttggaaaattgctccacttactgtataaaatgctgtaagtggaaagaagtgttcccttttataaaatactatgcagaaattaagtgtaatttttttgaagagtttaaatgatatgagaaattcttacggttttatgaaaaaggtggtttatgaaatagtttctataataaaaccaaaactacataaaacaggtatttttgaataaagaatacataaaaggaaacactccaaaatttcaataatagtatttttacttgatggcactatttgtgataattttgtctttattgtatatattttgaagctgaaagagtttattctgggataagaaagagatattttttgaaatatagtagacttaacagacttttatctcaagaaggttttgttcaatttttaaaattaatttgagaaggatttggatttaatgtaataaaaatgcccctttgcaaatgtgttttgccttatagtttatttctcactatatttgtgcactttacttatttttatatttaaggtatatgctgtgatgttttgctatatattattaagaaatgattatcaaaatcaagctaattaacatattcatcaccttataaagttacctttgatgagaatatttataatctactgccttagtaaacttcaagtatataatattattaactatagtcaccatgctgtatgttagtcccctttgatgaacatcactcccattcccccmacccctcaacatctgttaaccacctttctattcttggtttctctgagttcaactttatgaattctacccataagtgagatcacatggtatttgtcactctatggctgacttattttgcttagcataatgtcctcaggtttatccatgttgtcacaaatggcaggatttctttcatttttaaggcttatattgcattgcatttatgtatctcatctttgtccattcacctactgatggatacttaagttgcttccatatcttagctatgatgaatgatgccacaatgaacatgtgagtgcaggtgtctcttcaagattgtgatttcatttcctttggatttatatcctgtagtgggatttctggatcatatggtagttgtatttttaagtttttgaggaatctctatacagttttccataatggctgtactaatttacaatcccaccaacaatatataatggttcccttttctccacatctttagtaacactctttatcttcttactttttgataacacctatcccaacaggtgtcaggtgctatctcattgtggttttaatttgcatttccctgattattagtgatgttgagcgtgttttcatacaactcttggccttttgtatgtcttctttataaagtcgtctattcacgtcttttgctcatttttaattggactgagtttttgctattcagttgtacgaatttcttacatacattggatactaacctcttattggatatatggtttcaaacattttctcccattccataggttgctttatgatttgatgcacttctacttatttaataattcttaaatttctgcatataatgaaatttctttaaagataattgattttttaaatgcttttatttacctcagtcagcttcatgggtgcctgtgactttacataatatcaggaaagaacagagaagtacagctgtgataattccatgatcaactttcaaaatcatatcacagaattaagccaccaaagttgttattgcttctgccatgttcagtacatttagaagcagaagtctgtaatggacctgtcatctccagggccttgttgccttaactctttcattcattcagcaaaaacctggtgaaattggaagctccttgttgaattaaggaacaaccattgattcaagaacctcaaacttctaaccacaatctatgctagcaaagcaggcacatcatattctgcctctatcttcttgttaactcaaattaaagtctcatatatttatcataggaatctaataggcagaaccaaaattgcattcacattccgattcttaaagacagggatatgtaattttgaattctattacctctgcatattagaagatatttggtgatgcatggtgattacccattacatgaaaataatgtcacacgttggtggtatttattgtactctcgtttttaacgtatattcagggggactgggatgtccaatatgtggagaatggtggaatagaatataagacatgtttagaaattaccctcaggaacttaaaaaaaaaaacaaacagccagcgtggtggctcatgcctgtaataccaccactttgggaggctgaggcaggtggattgcctaagattaggagttcaagaccagcctggcaaacatggtgataccctgtctctactaaaaatacaaaatattagctgggcatggtggtggatgcctgtaatcgagctactcgggaggctgaggcaggagaatcgcttgaactcgggaggtggaggttgcagtgagctgaratcgcgtcactgcattccagccggggcaacaagagagaaaaatccatctcaaaaaaaaaaaaaaaagaaaagaaaagaaaaaaaagctaataaaaaaacaatcttctcaggcctttggttcatggaagtgaagaatgttttctccacagtcaatgttgtgaaagagatccaaatttctatcggataattcgaaagattaaaattaaattagagaacacattcttggctaattttatttctacttccattggttgtggccaaattttcagactttcaatttcattctatgcaaaatattactttccctttcatgaagatagaattaagccactcaaaaatggatacatctggttaaacagggacttaattcaatcattaggtagctttgtaaaagagagcttttaggctacaatacaaagggaatgaagcaattagattaaaaggaattgtgatatgataaaatgatttaagcctggattatggatggaagagaaaaccaggaatgattgctgcagatagggtagatttgccttaaaatattctacccattgaaatgacaaggaaactgtaatttttgaataaaggtacaaaatgaaactagatatattttacttcttctactactttacttctttcatccttaatattcttttgtcttgacagactggccaagaaggggccacatttgtatgttcaaagaaagtggaacaatggaatttaattaattcagttctgtttttgcaatctttattcattagttgaatattggctaggttccctagacaggctatcaatgtaaaagatcagaaaatattgcaatatatggacaacaaacttgatgctaaatataaatttccttcatgcrtcagtgagtggtggatttttgatataaaggactgcctttattttaggaagacgctcccttattaaagaaagaatacaagggttataagaagtttgaactttatgttaaagggagtgatattagtagagccatattttaaaactatgagaggccaagcactttggcttatgactgtaatcccattactgtggaaggctgaggtgggaggattgcatgaggccaggagttcagggtcagcctgtgcaacatagtgagaccttatctctacaaaaaataaaaaattggctggtgtgatggtgcatgcctatagtcctagctactcaagaggctgaggcatgaggactctttgagtccaggagtttgagtttgcagtcagctatgatcaggccactgcactccagcctaaaaaacaaaaacaaaaacaaaaacaaaaactagaagaggtgtgactgcagcctgagtagctagttagatgactatatagtacattttgaggccatatcctgacagctttcctaaagcttcacagagaatacagtagatgttataaagaataacaatcaactaaatatccggaaccactccatgttatctgcccaatactctgtctattcttctgtcttgacttttacaattcttcacttcacccttccccatattttatactctgctttccatctgctttatgtatcagtataatgaaaacataagactgtcttgggcttttgtttcgggtctcactccagatttgatttttaacattctctcttgctatggagaattcttgaattaccatctatttgggaacaatttttcatggatctctcatgtttctgcatgtctaagtgaatgaggcactgattgcccctcattttggaccatcttttcaagtatgtttttacagcaaaatagccttggaaactatagtgtcttcctctagagcaaagcgcaggtttgcttacagtcttgggagatagagattatgtctttcactggagcaaggaacaaaggaggaagggttagtgcccattataaaaagttcagatttctgaagcttgggattccattcatgtaatgtaacctaccatttgcatatatccacccaggcccatttgtgtcaccccatgaaactcaggagcaaggggaattgaggcaaatgtgatgatgttcatggtgtttgctgtgctatgagtaacaaagtcctttgtctctgacccaggaatgctgtatcttttgccatcatccttgagtctgtggcaggctaactggtttacttgcaagtagtgtgaaatctcagactacctttttctatcccttgggttttatttaattagctttattgggatataattcaccattatagagggtaaaattaaaaggattttagtgtattcacagagttatgcaaccatcaccacaatctaatttttgcacattttcatcacttcaaaaatatgtcttgtacccattagccatattcaccttatctccctttcctcccaccccaatataactttttctatatatatctgcctagtggacatctcatataaatggacagaaacagaaaattataataattcgagtaagtggatacaaattaattccttgggaatacagagggaaaagcagggtcaaaattttaattttggaaaggtagattttacagaattttgtgatagaaaatgagaggtagaaaaccaaagtcttgttctagccagggtgagtgagggatgaaataattggaaagaaaacagtctgagagggaagaacagaaacctagtaacaatgtgaagagagacagtaagcactagactttttcaatggaagggatggcttataaaccttggaaagagcagctattatgcagtttttaatgaatttgtgtttttgttttattttcattttgttatcctcaaatctttggtaaaagagtttttaaaacaacaggattatgcttattgttacttcaccaaagcaacattttgttcattctttaaacaaaagagatttagaagaataggcagaagcaagatgaaaagagaactggattgggaagtggaattctaaggaagaaatgactgcccagagagtatatgtagctttctcactcagaagacattttaaacataccgaggagggaattcagctgtctaccattgtgcggcatgtggattcaaataactttccttggatattaaataccaaacataaacttcagaagcctagaggactagggtacaaacataatacgagtgcatttttggttggttgttcttttaatctactcaattagaaatattggtctggaatggaggcgagtggtctgactgagaggtttaagccaccaactcactgggaaggagtcaacattgatgagaatttccagagaaagggaatggagctccagaagaggtaagagtaggcactaaaaccaatcttgcaatgatggataaacaaagatgaattagaggaattatttaggagaagtgagaacaaaaaagaaatagcttttatgaaaacaaggatrtgtgtgtgtgtgtgtgtgtgtgtgtttgtgtgtattttagaagtagaaaagtttattgaatgctgatagaatattctttatggtatgtgtttctttttgtgcagcaggttggggaatggatgtggtgggtattgaattatagttttctctggaagatacctttgacttttatttcttttcataagactgagtgctttctgaaagtatcaagtgggaatcctgtcattattaattagtatttattgaatccttattatgtccacaagcactttctgtatatgactagttctcaactggggagactttgacccccaggggacatctggcaatgtctgaatcttttgggggttgtcacacctgtgtggggttgttgctggcatctagtaagggtccaggaatgttgctaaatattttgtgatgcacaggacagccccctgcaaaaaagaattttctagcccccactgccaatagcactggagttgagaaatcctgatgagaaatgcaagttttaatacttccagaaacactttgagatagataacttttatcacttccttcttccagaagaggaaactgcagcatgaggattttgagcaacaatttttagtaaaggaaccaaacaccgcatgttctcactcatagatgggaattgatcaatgagaacacatggacacaggaaggggaacatcacactctggggactattgtggggtggggggagggggagggatagcatcgggagatatacctaatgctaaatgacgagttaatgggtgcagcgcaccagcatggcacatgtatacatatataactaacctgcacattgtgcacatgtaccctaaaacttaaagtataataatcataataataaaaagagtaaaaaataaaaaaattaaaaaaaaccacaatttttagtaaagggtagagcctagatttggatggcagtagtgtgactcttgagcatgtgttacaccctatgctctattatctttgtaaattacccctatatgtgtgtaaccaacccctgctacagcaacacaccttgtttgcattaactcaatcagaacaaacatatttatttaaatacatccttccccaccaagacaaygtgcttagaagggtttccattcttcttactttgcatagaacaggaaacatagcaacttagagttgttctcgggtactagaagcaataggcagcctttatttatgagctgttattttatggcattttaatttatttttaaagcttattggtttatctttttcaagtttaggattcaatgaagggaggattttcatataagccaaggmaatttttctctccagtatagaaaacttatatttatacacattagaaactctaccagctcagtcttttaaggaacacatttttgtcatagagatgcaattcataatagckgaggaaatgtcattttagttctaagttaccataagcaccacttggactgctacagaggtactctsyggagcaaaatttattgttttacctatactaagtacttagtgtttttaagagatctatgatgctttcattccagattaatttaaagtaatgctcgcagtatactcaatctctttctctgtatggtggaatttgaagtttgtcttccccccaccaagaatattttatttcctcatgtaattaccagtttttggctgaactttttgtattataggcagaaagcaatatattacatgtcttaagtccttctgcttaaatattatggaagaataggccctcaccatatggcatattgtgtgtattttaaagtgttcctcagagtaaaaagttatatttattctgatayatgccttctacctgtttctttctccttcccttcctccctctgtccctttcttccttctttccttccttcttttctttctgtctctccctaacctccactcatgtcccctttccttctcttatagacttgaaagtacttgctctttaaaaatcaaccttgacatagtctgaatatgctagtggaggtcctggattttaaaaattagctatacacttcaaaacattttatttatcagaaaaaaataatttacctttcctaaaagaaaacacagcaagtgagaaattatcaaatgattgaaattttacttctggctatgcatagtaagtactctgatgtatattgggacatattctgaagagagcatgcttatgaaatcatctatgtccaattagcattgagaatttgtttaaacagaataaagacctctaaggtgttttagtgattttgctattctttacacaaaaggcttttctccttaggtacaaacacacaacagtaaaaacctataaaatccttccctattctagtgacaataaaaaaagaaccattgtgataaatttaataacaaatagaaaatacatttttattttaaataaacctgatgttgtagatgaataagaactgtttttctttcctgttatactagatgatttataatgtgtccatttgcccaaattagaactccaaaaattatcttcatttcttatttttatttttattatactttgagttctgggatacatgtgcagaatgtgcagatttgttaaataggtatacatgtgccatggtagtttgctgcacccatcaacctgtcatatacattaggtgtttctcctaatgctatccctctcttagcccctcaccccgctgacaggccctggtgtgtgatgttcccatcactgtgtccatgtgttctcattgttcaactcccacttatgagtgagaatatgtggtgtttggttttctgttcttgtgttagtttgctgagaatgatggtttccagcttcatccatgtccctgcaaaggacataaactcatccttttttatggctgcatagtattccatggtgtatatgtgccacattttcttaatccagtctatcattgatggacatttgggttgcttccaagtctttgctattgtgaatagtgccacaataaacatacgtgtgcatgtgtcttcatagaagaatgatttataatcctttgggtatatacccagtaatgggatggctgggtcaaatgacatttctggttctagatccttgaggcatcgccacactgtcttccacaatggttgaactaatttacactcccaccaacagtgaaaaagtgttcctatttttccacatcctctccagcatctgttgtttcctgactttttaatgatcaccattctaactggtgtgagatggtatctcactgtggttttgatttgcatttctctaatgaccagtgatgatgagctttttttcatgtttgttggctgcataaatgtcttctgttgagaagtgtctgctcatatccttcaaccactttttgatgtggttgtttttttcttgtaaatttatttaagttcctgatagattctggatattagccctttgtcagmtggacagattgcaaaaatgttctcccattctgtakgttgcctgttcactctgatgattgtttcttttgcttcacagaaactctttagtttaattagatcccatttgtcagttttggcttttgttgccattgcttttggtgttttagacatgaagtctgtgcccatgcctatgtcctgaatggtattgcctakgttttcttctagggtttttatggttttaggtcttahgtttaagtctttaattcatcttgagttaattttgtataagttataaggaaggggtccagtttcagttttctgcatatggctaggcagttttcccaacgtcatttattaaatagggaatcctttccccattgcttgtttttgtcatgtttgtcaaagatcagatgttgtagatgtgtggcattatttctgrggcctctgttctgttccattggcctatatatctgttttggtaccagtaccatgctgtttttgttactgtagccttgtagtatagtttgaagtcaggtagcatgatgcctccagcattgttctttttgcttaggattgtgcaggctatatgggctcttttttggttccatatgaaatttaaagtagttttttctaactctgtgaagaaagtcratggtaggttgatggggaaagcactgaatctatgaattactttgggccctatggccattttcacaatattcattcttcctattcatgagcatggaacttttttccatttgtttgtgycctctcttatttcctcsaatggtagtttgtagttctctttgaagaggcccttcacatcccttgtaagtttattcctaggtattttattctctttgtagttaatgtgaatgggagttcactcatgatttggctgtttgtctattattggtgtatagcaatgtttgtgatttttgcacattgattttgtatcctgagactttgctgaagttgcttatcagtgtaagatttggagctgagacgatggggttttctaaatatacaatcacgtcatctggaaacagagacaatttgacttcctcttttcctatttgaataccctttctttctttctattgcctgattgccctggccagagcttccaatactatgtggaataagagtggtgagagagggcatccttatcttgcaccagttttcaaagggaaggcttccagcctttgcctattcagtatgatattggctgtgggtttgtgataaatagctattattttgaggtatgttccatcaatacctagtttattgagagtttttagcatgaagggctgttgaattttattgaaggcattttctgcatctattgagataatcatgtccgttttgtcattggttctgtttatgtgatggattatgtttattgatttgcatatcttgaaccagccttgcatcccagggatgaagttggcttgatcttggtagataagctttttgatgtgctactggatttggtttgccagtattttattgaggatttttgcatcaatgttcatcagggatattggcctgaaattttctttttttgttatgtgtctgccaggttttcatatcaggatgatgctggcctcataaaatgagttagggaggagtctctctttttctattgtttggaatagttttagaaggaatggtagcagctcctctttgtgcctctggtagaatttggctgtgaatctgtctggtcctaggccttttttggttggcaggctattaattactgcctcaatttcagaacttgttattagtctattcagggattcaacttcttcctggtttaggcctgggaggatgtatgtgtccaggaatttatccatttcttctagattttctagtttatttgtgtagaggtgtttatagtattctctaatggtactctgtgtttctgtggtatcagtggtgatatcccctttatcattttttattgtgtctgtttgattcttctctcttttcttattagtctggctagtggtctatttattgtgttaaccttttgaaaaaaccagctcctggattcattgatttttttgaagggttttcatgtctccatctccctcacttctgctctgatcttagttatttcttgccttctrctagcttttgaatttgtttgctcttgcttccctaggtcttttatgtatgatgttagggtgttgattttagatctttcctgctttctcctgtgggcatttagtgctctaaatttccctctaaacactgctttagctgtgtcccagacattctcgtacattgtgtctttgttctcattggtttcaaagaacttatttatttctgccttaatttatttacccagtagtcattcaggagcaggttgtttcagttgccatgtagttgtgcggttttgagtgagttacttaattctgagttctaatttgattgcactgtgttctgagagactgtttgttatgatttccatgcttttgcatttgctgaggagtgttttacttccaattatgtggtcaattttagaataagtgcatagtggtgctgagaagagtattttcttccttaaccccacatgtattcagtcatcatagccttctcttctcttctcttttctgagttaggatctctctttgtctcccaggctagagtgcagtggcatgattgtggctcacagttgggaatttgggcataaggattttgtgcagggaaggaaaatctataaccacagtaagtgtctatttcagtaagaacaaaatattgcccttctatgatagaagagacccaatttaattawtttgtcagcagttagctgcctgatcacccacaagaatcagccatacaagggactcagtgttgttctctgctgctggattagacattcatcagtgccagccttgttaagtgaaagtccatgttgctgagcgcatgcatatcctccattccttccaccatgactactttgttcatgaacccattgagcaatggcaatgtggctagagaaagagattgactggtttcctcagaaagggtcattttaatcacttgattattaaactttttctctgctaagatcaccccttggtgaacacttatatggcatagaaatatattcacattttttgcccacataactcttcctcaaatgtccccattgccaattttccaatcatatttctttcaagtccctggtcatttagccaaaccattgactgcagtttattgatcagtatatgatagaatatctggttatttctcttttcaagcaaagtaaacaaccaggtgcaccatttgaatttttgcaatttttgcccattggaaggatttcccttcactscagtccatcagggatgtcccgcaacaggggctacagagctacagttgtccacttttgagtggtaactgcatatcatgcagaaccatctgtaaaccaggccaaagtcttctattccttactcacctgatggtagtgtactccccatgaggccataggtgcaggctgagaaatagaaagtgttggaaccagagtggagaccatgggcatttaggtcattgctgtaagttggatgattgtcccccaaaatctcrtggtgaaatttgatccctaatattggaggtggggcctaatgggaggtatttaggtcataggagcatatccctcatgaatggcttagtgctgttctcatgttgatgagtaagttttcactcttagttcctaagagatcaggttgttaaaaagactctggcttcctcaatttcactctcctgcttcctctcttttcatgttatctctgcacatgcttggctctccttctctttccaccatgartggaagcagcctgaagccctcactagatgcagaccctggcgccatgtttcttgaataatctgcagaactgtgagctatatgaacctcttttcttcataatttacccaactttaggtattcctttacagcaacacaaatgcactaagatggtcatttctatatgtaacttttgccttcagggcctgcttaggcytgatcacatatctatcacttttgtttgaggatggaatgtggcagtgcctgttgaactttatggcttggtgagtcagataatacacagttcataaagagcagctcaggttgcataacttggtggcccatggttaagcatttattctccattaaggaccagcaggaggtcaaggactgtttctcaaaagaagagtagttatctgcggagggtgtcagggctttgcttcaaatactatcagagccttccaaaggctccaaatagcattcctgtctttcacggatactttaagcatcactggatctgctggatcatatggctcaagtgacagagcagcttgcacagcaggctggacttgttatggagtcttttcctattctgggcctttactcaaaactagaagcttgtcaggttactcagtaaatgggccagagtaacacacctgaatgagaaatatgttgcctccaaaatccaaataggcccactagccactgtgcctcttttttggttgcaggaggggccaaatrcaacaacttattctttaccttagaataaatatcttgacattttccacaccactggacctgtagaaatttccctgaagtagaaggcctctgaatttttgttacatatatttcccactctctgataagcaaatcccttaccagtaagactagaatagttgttacgtgttgctcastaagtccaatcagcataatgccatcaatataatgaactagtatgatatcttcttgaaggaaaaggagatcaagatccctgcaaactgaattatgacttagggctggaaagtcagtatacctcagaggtaggacagtggaagtgtattgctgtccttgccaactgaaatcaaaatgcttctggtgatctttacaaagaggtatcaagaaaaatacattygccaggtccatagctgcataccagatatgtgttaatttaagcaaagaaaccatatctgacagaacagctgcaattatagtcrctacctgttttagcctatattttcattctccaagatccatctggcttttgcacaggccaaatagcagagttgaatggagatgtggtgaggatcatcacccctrcatctttcaagtgaattttggtggcattaatttctgtaatccattcaggaatgtggtattgctttttgtttactatttttctagatagagggatttttttattggtttccacttggcctttcccaccataatagccctcactccacaggctaggaaaccaatgtggggatactgccagctgctgaatatatctattccagttatgccttctggagctgaagaaataaacacagaatggattgacagacccactgggtccactgtgcaatgaacctgagctaaaacttccctgaccacctgaccttcctaaactcccattctgattgataggccacagtgatgttttgggtctcctggaatttgtgtcagttaagagccagtgtctggtatgtcctgaaaggtttgaytatttcctcttcttcagtacacagttacctttgtaaaataccataggtgcctgtggaaaagggtaggataatgattgacagtataaatttttgatactgtatcagaatccttcctcataggttcctagcctccccttcattcaaggggttctgagtctgtatacaggcccaagacctcattaaggggtcatgacatttttttcttttctgaagtctgtggcctgtcaggtatgactctctgttttcatgatttgggttagaattttgttcacttgacttagaacrtttttgcatatagagatcaagtaagactttagtaggcttcctatctatctgactaattgattattgtaggaacaccataatcaataaatcaatgtcataggtctgcacaagtcagactatccaattgctgctttgcctttgctgtcccttacagtaagygtgcccaccttgcctttggccattgagtgcctgcctccacttacatccaattacttttattactcccagaatagmattactcctattgcatttaggtttccaaattgaatatctccatttcctactacagttgacccttgaacaacatgggtttgaactgtatgggttcacttatatgcagattttttttttaatatatagtttgccctccactatctacagatttgacattagcaaccaaatgcaattgaaaatacagtattcatggaatgtaaaacccrtcgatttagatggccaactttttatatcttaggggctccacagggttgaatgcaggacattagtatatgcagattttggtatgtgcaggaagtcctggaacaaatcccctatgtataccaagggacaactgtataaggtctggcctatggaaaacaaaaagctctttaaggatgctgggattccttccacaaatttrtttctcacagtatcagggaaaaatgttttctggaccctccctgtgtgggtgagtatgttttagatgacaaatccactctaacataacaatcctcctaagcctttgcatctctacatcaaatcaaggcaggtcaggcatttctaatttgctgatggtgggccatcttttggtccatgtttcagccaatcaaccaagaaaattacagccccttctaactccctgagctgcaacattaaatgcagaatctttccttagtgagcccatatcaacattgaactcatccaactttatgctccttccaccattgttttatacccttagcatccatcccacacatattctccaggtttatgtctatgtaaattagaaaattcaagtagttcttttggagtgtagtgcacctcctaatgggccatattttgtacctcacctttggggtctgctgggtttgagtctagttrcaggtctagaagcaaagaggggtgttasgtgtgggttctgaagagaatcagccttgtcttgcatagaaactacttctggtgaggccattaagtttccccaggcaatgcagaattaatcttcttagatgagggtagaaagcctgctactactgggaatgggaaggctgtttccactggggctgtggagacttcttccactggcaaaaatactcatcaaattttaggggctcaatgtccccagcttcawcgcatcttcctacacgtctcyattccaatatataggattccattctttcccaatcaatattttcattttaacagtagatacctttagggctgggagttcaacttgcattataatttagctagtcacaagatgagactgtacctttaattttccataatctcagccctgtgtttacaagagatatgggtctccttaaaggcacacatagaagcacacacattttttgatctatcagatgggaatggcaatgccttctcataaagttgctgcaaggaataaatgagatgatctgtgcatagtagtaatcacaaacttgacatatggttgctgttcaatcatgttacaaatcattatcattaytgtacatacagcacatkaccattacacatacagcacttttgctgcgaatttgaattcctgagctcatcttcttctttcatcacttcgtccagcaacattaggagcaagcaatcaatcaacatcattatattaattagctttccgaaaatgtttaaaagtaccacatgcacaatcagccagcaatttgcttcataagccattgactaggagtacccaagagatattttccatatctgtactaccggttccaaccatggactataagtgctctctttactactagaaataaggtcattagcagatttaaatctaataagattatagagacaattccagaaccccaaaaccaattcagaaaactcatccttaaaattctattcctctagaaccaatcctgttaccaacatctgtattagccagggttttccagagaaacaaaaccaatagaatagatagatagacagacagatagatcaaaagaaatttaatataaggtgatgactcacataattatggaagctgagaagtcccatgatctgccttctgtaagctggatacccagggaagacasgggtgtgtagtttaaaggcctctgtaccagaaagctgattctgtggaatccagtcagtgtctgaaggcctgagaataaagcatacaaagcaaaagtttgatagctcagctccagcagttaggcagagggagaatgagtctaaccttctgcttttttgttctattcgggccctaagtggattggttgatacccacccccattggggagggccatctgttttattcaaatgctattctcttctggttaacaccctcacagaaacacccagtttggtttgattagatatgtaggcatctcgtggctcaaattgacacacaaaattaaccatcgcagtgtttcttcagcaatttatttgcatggttttccctcttgggttgacayttgatttgtattctacaattttctgttgaaaattgtatcatggataataatttcattagattggygagctatgtttaaccatgttcccataggatttaaagtacttttaagaataataatgttttatatccattgctaatataatctatggattttatcatgttaagacatctgctacaaaaagaggtgattccatragtgtgtcatttgctatttctaagcatatgggaagcaaaatcttgtgattgactggttaatagttyggttataggttgagttgcrccccctcaaaaaaaatatgctggagtcctaacacgtagcacctctgaatgtgacctcatgtgaaacagggtccttagagaggtaactaaaycaaggtgagatcattaggatgagccctaatccagtatgactggtgtccttatataaaaaagaatttggacacagacacacacagggagaacgtcacataaagaagaagacagagattggggtgatgcatctgtaagccaaagaacaccaaagattgccagccaaccaccagaagctgggaragaggcttggaacagattctctctcacagccctcagaaggatccaaccctgccaataccttcatctgggacttccagcttccaaaactgtgagacaatacattctgattatttaagccaccaagtatgttgtattttgttacagcagccctaggaaattagaaactaataaatatatccaggtaacgaatggcacatactgtttgttaatagatggggtctgcaatactgagaaacagttgccaataagggactatgtcaagatttatgtacaaataaataaatatcctagtatctatattaggaggaatacctgcatgaaagcaaagagagaaggagccagttaagcctggagcagctgaataagtctaggagagtgatcagatcaccgtgcaagtttaatactggatgaagggaaggtagagatgacaatagaggggacatatcctaaactgccctgcagtctaaggaaggttcagtttgccaaagcctytgtgttgtctttaagccaaagtcagctgtcggggatagctcrggtcctccaggaacagattggccttagtatccctgccatgctcattcactgcttgtgagcagctgtagcaggcacatcctcagctcaaatgaggtgatggatttccaaatgcagtttgggacccttggttaagtcctctccctgaagtggggaggtytgcaaggcacattctcacagtccccagagatgctcctcaagkgagtgaaaaactgatatggaattcaatccttgaaaaaaaatgaaccaaatgaaaatactatccaagaattgaaaaaaattcactcacctagagtgtaggtcacctgggctgtgaaaataaatcagttctaacacataaagggtgaacaaaataaaacattttgttactcatggggcagtttaacggtgggaaagttggaagtgggattgaggaagttgctctccactgctccacacaaacaatgagagatgcaggtgataatgcctccatcatctttaacaagtggcttccatgtttgttctggggtaggggttgtggtcaccaccctggttagctgaaaggggaaagtatggagtgctgtatgtgggagacttttatggtcaaggccttaaaatggcacacatttgttctactcactttccattagctgaaattcagtcatttgcccctacccaactgcaaagcaggctggataatatgcttaagctttgcrcccaagaaaagagggaaaggatcctggtgtacaactgattacttctaccacacctggatatggccagttattagtatttgtgacctcaattaaaaagaactccaaaatagtgactgaaattctcagttttatccagctgttggacattatgcaagtacagaaaatagtcattagctaatgcttttaggattaaaggtatctacaatatatggccacacatcactataaagttaaaaagtaaataaattaagcatatactgaggggattattacaattccatgtttcataattgaatagtgtacccccaagttttataatttaaaaaaatgcaattaagtattctagaaatagaattacagatggcccaaatgaaaatgtatggaggtggataaatccgacatgttgaatcagtcctataaataagtttctctttggttttgttttacaggcttctgagagtgtattttcaggctcatctttttttagattatctgtattctcagtgtatatatattcatagccttgtaataagaaagttatagaagactaaaagggtaaaatacaaattatatttctagtagcaaaacaatactaaataattaggaataaacgagggctaaataccaataatactaatttttttaaagaataaaacaatactaatcaaattgagacaagcatcaaagttcaccaggtgccttgcgaactacttttctcyagttcctacctatccttgactaatgtatacgatgagtatactgccaacataacaacccaccttttcacaggttgtactgaagcccagtctgaaataaggcctaatgattatcagtgtggcccacatcctcagtgcacctagattggaatgacaactgtcgtactaattatctgtatgaccttggaaatgtgcaatgyctttaaactctctgaacctcaatttcttgatctataaaatgggaatgacaatgccttctcatgaagttgctgtaaggaataaatgagataatctgtgcatagtagttatgacaaacttgacatacagttgctgttcaatcatgttacaaattattaccattattgttaataatacaaaacatttttttggtaaaagcttctactcacctagttagagaaaacggtgtccagaaaacagttattagtttccaccgaaatgtttgaaaatgttaattgttctcttaatttaagagattgggccctctgtttagatttggaggaagaaggctgagattttgcgggggcctactgggtttttctcctatgccctgtgaaagccaattggtgcctgctctccagcttcatgctttgaaaacttcctggaaaccagattgagtccatgcccttcacttacttattttacygctggttccaacagtcagccctaytccctcctgttagaccaaacttgcatcttagcaagggctgccaattgactggagttaccaaggcccagtttttgaaactgctcattgaatgaagatcctccttgggttgtctgctctgtcttcaaggtgatctatrttattatcccaatgctttccacataaattgatttccttttaccattttatgagagacataacagttccaaattaagttatttatatctaagtgatattactttattatcataattattatttttttctggggtaattcctttctgtatttagtttcttaaaaatatgagaataaatacatccacaggataaatgatgataaacccatgtctgtttatctgatattgtaatgattatggtaaacagtgagactacgtcctaattttgatatattttttgatgaaaagtttgagttggaaaaacaaaatgacattcaattttcaagtctcccccaaatatgatacacatattgtaaaatgaaaatacatctcccccttatatggtacatttattttaacattattccaccttaaaactgcttacattttcatttgaggaaaaagaaatgctacctcatgcaaatatttttctttctgcatcatatgagtattaattctttcatctgacctttctcttttttttttttcatttcactaccatgtgccaggatattatattaggtattggtaattcagtaaagaagacagaaactgtctgtgttttcagagagtatacactctagcagtccacgaagctaaaataactatctttaagtggaacatgtttcatctatgagatcattcattcttttatcaagtgattattgagcatctctctatgccatctgccctatttcctaagttagtagattatagtggtcaataaggaaatgaattaaatttttgaaaccgttctagacaaaccccagttgttcacctgcatgcaatggaatacagaatatacaggacctcagccatccagaagtaggggattggagctatggaagcaggaccgtctcttcaacagatttttctgctaaatggtcctgtactgcactcaactgcgctctcctttctccctatcaccattcttctacttgtgatttaagatgaaaatgtcaacatgaggctttgatcccaactcagtgcccctgcagccattttgttttgttttgttttttgttgtctctagccattttggtgtggggagtgaactctctgatgcgaatgcctgattctttttctcccataaatgttgtttaaataccacaccaaaggccgggtgtggtggctctcrcctgtaatcccagcactttgggaggccaagttaggcagatctcctgaggtcaagagttcaaggccagcctggccaacatggtgaaaacacrtctctacaaaaatccaaaaattttagccaggcatggtggtgtgcacctgtaatccyagctactcaggaggtcgaggcaggggaattgcttgaacccaggaggtggaggttgcagtgagctgagatctcgacattgcactagagcctgggtgacagagcaagactctatcccccacaaccccataaaaaacaaacaaacaaacataaaaccacaccaaaaatttaaatgagaaagagagtctctcaatgtctagataataatcttatctcctggattgtcacttatgaacatgtgaggtgacaaaactatttaatggataagcatttagcaaatgaaaagaaaatgtctgtgattattatgtaatcctagatgactcattatacttaagtaaaggggaacatgaatctcaaagaataatgagaattgttgagagtgtcaacaaattaagaactagatgttcttaaaatgaacctggtccttattgttttaaaaagatcagtgaggaatcatgcaaatggagaatgctatattgctagtatttaaaaatgatgtaaagaactcaatgacagctctaactacttaaaagctttccattacaacttgaagcatttgtccatatcatttcaaagctatgaaagtttagactttagttacctgacaaataacttagattctcagcatataacatccatttgactatacatattctgtaaaattcacattgaagaaaacaagcaaaagcagaattctgatattcactcatttttgttttgggtagattctacctttggaaaaataagataatattttcaagaaatgttgaaatgatatcacattagtgatactacatgttaaattttgacacaggaatactgtattatttttctaactctgggcttacaagtttttatactaatgataagattattcttattattgaattcaattctttgtttcaatttgacggcaaattggtgcagcagatccaatgaaacaaaatgatataggttctcccccacactctttctttcttttttcttttcagaactggcgaacagctgtgtccatatactataattgttctctaattgttcatctttgtttcaaaaaaaaatagaagattaaataagcacaaccttttggtgtatagtttttaatttataagaattgggactcattgttaggtccaagatgaaagggtaccacagttggcactttaagctgacacagatctggggagccagtgacattgcatctctgttaatgatttcacctcttgcactgtgttcccaccaaaggaaacatatctttcagcttgaagtatgtgaaggagggaggaaaggaacaattcaacctaagccctaaagaaaagctctgtaggttgtgctgagcactgagcagagaaatggccccattagcttctgcatgggctgctcactagactagtttgaagtggagtttcactgaygccttgcctctaggcatcctttccttcacctcaggatgaactgctactatgatttttaaagactttttaaagagaaattacaaaaagtgccatttgtttctttttgtaattgttcaaagagaattgttcaagagaaacaaatggaagacactaaggacttaaattagctgtgctgaacagaccttagtgatgttcaggaaaatagacaagaaaagagattaaatatctgctttatttaaattcagcaggaagaaagagccctacatttacaaaatgtttccctggaaacactattctcaagaaaaaaaacaaattcttccttgggtcattaatttttaaatggtaaaatgagttaatagaaaattrtaataaataaacacatatatacatgttaacacatgttatctatatgtatatacacatgttattcatatacacatgcacacactctcatacatctctgaattcatcacaatttacttcctgtctcattatggtgccacacaaattataccgtaggcagcagcaccatagatcgttattaagtcatccaacacattcctttgctgaagagaagttgttctctataatgtatttttcaatcctttcctcatttcatgtttaaattactcagccacaggggatttgaagatatcccttggaaaagtgttccacaggctgacatgatggggtttacacaggtgctttaagatatttaaactacattttcttttactcaatttcatgttactgtttctagttaggccttatttctactatcttaaagtcatttttaccatgatcattactttcgcgtctatcaagacaggccaagagcaatctacatgatcattagtttgcttgttatacctaccaagttctttgcattgtttcattttaaaacatcctcttagcctcttagtcatgctttgtgatttgggtaaactattcactgttctacaattattagtcaaatattttattctcatagcactttaaaagcaagacttgttttagaaatctttcaagtcttgacattcagaaattcacatttaagtgattgtgggttcagaggaggtagaagttaagtcacagacccttgttctttctgtatcaagtgtataaactaggtacatagtgagttattgaattaaaacattgttctcatatattaaagttctattgcaaatayagcatttgcagtcagaattttaaagattaaacctgttcagtcctgaaaaactgtctcttctttgatactccatttagattgtctcccatatcaggtataatttccttgctcgctgtgttagatattaccttaataatttctgtttatgttcactatttcagcatttttcccctacatcaatgctcattggaaggtttttaatatagtcttgaacagtacaaccaaaaatgtgaactaaggataaaactgtgggaaataccaagatttaaaaaagaacctcctgggaaacagaaaaaggaggagctagtatagcatcatatggattagctccctttttttttcttttctcaatgctgaagtgcagaactatgttgagcttagatatttagttgaactaaacattatatttaacaagactttgatatggtaccatgccagaccttgaacaaaaaaaaaaaaaaacaagtttaatggataatacctgcttaattatctattgctacataaaaaaatcaccccaacacttagtgactcaaagcatctactatttcacaactgtgaaacttctgtggtttagaaatcttggcatggtgtagctgttttctcccactcagggattctcacggggccacaataagatgttggccaagttcgtagttatcttcaggttcaacyagggcaggatatactcccaatctcactaagtttttctgggtaggatttagttccttgtcagctactggactggaagtctgtctccctaagatccttggccagagaccacactttcagttcattgctatgggagcctcttcaaaaaggcagctcagtatggcagctggtttcatcgaagtgagtcagacaaggacagagaggaccataaagatgtcacaggttttgtttgatttttgttttgttttgtttgagatggagtttcactctgttgccaggctggagtgtagtggcacgatctcggctcactgcgacttctgcctcccgggttcaagcgattctcctacctctgccttccaaatagctgggactacaggcacgtgccaccacgcccrgctaattttttgtatttttagtagagacggggtttcaccatgttagccaggatggtcttgatctcctgaccttgtgatccgcccgcctcaacctcccatagtgctgggaccacaggtgtgagccaccgcccccagccgtcacaggtttctataacctaattgtagaaatatcattccatcattttgccataccctatttggtagaagcaagtccctaggtccaggccagatacaaaagagacaattacacaaaggcttgaataccagcaagcagggctttttgggtgccattttagatggctatctaccatctttagttgtacctaggattgaggaaatggtatccaaaaaactgggataaaacctaaattaacatttatagcaattaataaattcagccagtcatcttctcattagtatgtagtactttctggatattgagtgttgctattgcagtgaatgctgaaattattactcctgccccatgttgaggcctgaagccctcattcctctagatgctaggagtgttggtagataacacctctcaactgtgattttccacttggaaattggcttcagctccattgccaaaggtcactcccttcctgggcaatagcctacctctaatgactgatgaatgttgagttttaaaagcccagctcctttgccccagggttggacagctctgagtgctcatcctagctccagggcttttggcaaggtagctgagatctttgttgtgactgcatagcagtctaaggcttcttttcacccaacccagctcatttcagtgggctacaagtgtgatcctgagagcactcctcagtaaacgtcctgcattcaaatctagggcttatggtctattcttaggaaacccaactagcaatcgcttcacttttgactctttctttctgtgtaaatgtaaaatagctaacatataaatgatgaaatattaacatagaatatatagacgtttcatatacttatgatacaggatatttccccggacccttcacgggactcgcgacagaggtgccttgtttactcagccagctgctctcaattcctcacaggagggagcatgcaaacgaatgagtacaggaaatggagtgagcgaatgcaggaaccagccaactgcttttgtaggctagcaggagcaaacttcatgcggtacccccagcagcatccctgtggggttatgtgcgacccccaaaaccccaggggcaggttaccgtctcttttacctctgacattgcagctcagtgggccctttgccttgacagccttttgtatctacactcgtgtctcctgagctcttgtctggcatccagggaaaatgaggttgcacaagcgaattgaaagatggtaaacgcaggggattttattgctgatgaaagtggctctcagcgggaaggggagctgaaatggggagggacagataggtaatcttcccctggagtctggctctctcctgggggactcttctctgaaggtatgccatcaagctgtccctctgaagtcaagccacttctctctgatatctagccacagtccattctaccacctgtgtctgggatttttacaggcacaggatagggaggggcggggtcatgagtttagaaaaaggcaacatttgagtgggtaaacggggatgtaagttgtcactttgggccgcagtttcaggctttttggcttgagggtggggttttcactgggaacctgcccttttatgcctagaatttctctgcstcctgtccccatcacttatagacctcttaaaagggatactgaaatgcatctttaagtatgtcaagccaaaacatcagaaattcacaatatggtcccctgtataatttaagtaaaattgaagggcatgaccctgattttcactagtggttgattaacaaacagccattctcatttactacaaagctgttactgaagatctagtttatcacattctttctgtcacctataaataaaactttggttgcaaagtcttcatctagtatcagaggtgagttccttttatcttctgatttgcttctcacttctaacttagaccatggggcaaagttttagctttctatgggaaatcattaatacaaataaaaacaaaatagaacacatcaaaaaccttaatactaaatatggagattggaagcaaagtcaaggttatcacattatatataaatcatgataatcctcaaaatatgattactatacatcaaaacttccctactttactaaggtggcattcacacaaatcttaacagtgcaatgtggcaattaataggctgagagatgtaagagtggaggaagtatcctcaagcaaaattgaaatgaaatatagaagagtgagatgtaaaacttgatatctgttaggatttacaattttgttatgattttctcatggacttcttgatccccgatcctttcctcactcttcagctgctttggtcggatctctggtgggaggactggcctctgatggttatgtttttccatctcctgggtcatgtttttccgtctcctgtgtcagctgacttccggagaaagaccggaggagctgggaagaagggagaaacaggatataacttcccttctctctctgcattgggcagtgacttcagagcagctmtctcctttgtggctccctacctttgccactgtctgactcaggtagcactgctaacctcccatgtccttccagcctagcaggggtagctgctttgtgctgttattaatctttagtttgcttcattgccctttttggcttcttagctcttttctgttacctgtgcaatgaagtcctacttaattctcacctggttaaaacgcatagaatggtttatggttgtacctgggtggctacaggtrccgtaagtatacttccattcattgcaacaacarcaaaaaagtccctgacaaataatggtctttataccattaaattaaaaaaaaaatcctcaagattattcgcattttatagataggaaagattagctcagcaagaataggtaacttgcttgtaatcacgtatctcatgcatagcttacatkaggagggtgactgctaaacccagacaacccggatttgaatcctgactccagcttttattatacaggcaagttacttaaacaacctgtgctcaattttctcatttataggttagggactttatawctacctcagaagggtattgtgaagattaaataaattattgatttaytgcttagaaaagttactgacacatagtatatgctcaataaaagctagctattattagccatgtggcttcagtagtgttattaattactttgaaatgagaaaacacgctacaaaaattgcttcttggatttgtagcccagtgtgtgttttgagaagaaacagttgcaaatgtatgacataatattgaacaataacttctaatttggttaaaaatctggtcttctactgctgattatcagaacagtttagaaaagcaagattgatttcttttgtggaatagtcaagagaayaccacaatggcctaaggcaccaaatgattgcaaaccatcttcctgcaattaaaatggccagagctgacctgctctttattaaacattaatctttggcttcttctgaatgcatcagtgagttcaaggtctggatatgtatgactcatgcaagctctgtgccattaagctgttttataggagaaaagtattcttcattgcamtgagcctgacacttgagtttctttgtataatttgaaatttggcagctcagtgtatacttaaatgaaaaatgcttttttctaaccatcatctagatgatagaaacattgktttcaccatttaaataattgtacagaaaacaatgtggtctgaaaatatcatgaatatatatatattttacttataataccattagcacatttcatttttttagtatttctttgctcaatatttatatttggaaacatctcaacagctgcaarttatatggataagttaaattatgctatttatttgcaatcacgtggaagaaaaagcaaatgcatatattgtaaacaaaaattttctatgaattacatttgtgtattttataatgattctgaggcatgagtgtatctctatgcaatataaaataaagtggartgaaataactaatgaatagccaggcagatcattataccaaatattttggcttttcttatatatatactcatatgtttttaccatctgcaaaaatatgattgttttctatagaaaatttcctcaatttcttctattctgtaatcatgttctgtaacctattctgtaacctttttcatgactacaaaagctaacatgtcaattctggttattttgactattaaatgaataggagattttgaaactaattttgtagctgggtatcacatatccccaatgaatattaatttgaaacttatggctagaagtatggcttttgtttttagcatyacaatgctttattttcttagctgaatctttaatataaatgaatacatgattttttctgtacttttgcgaatgattacacacagtcaaaaatccatgtataattttgatatccctaaaacttaactactgctaacaagaagcctgaccaataacatagtcaattaacacgtattttgtgtatctattatatattgtattgttacaatatatgcattatatactgtaaactaaagaaaatgttgttacaaaatcataaggaagcgaaaatgtatttactattcatcaagttaaaatggatcaccataaatgtcttcattctcgtcatcttcatgttaagtaggctgaggaggaggaggagaaagaggagagtttgtctccctgtttcaggagtggcaagagttagatgagatggaggaggtagaaggggaggcagaggagccaggcacagttggggtaactttatrgaaattcatcataatatatgactttttactttttcatttctctgaaaatatttctatacagtactaatcttccttccaccatatgctttagttttgtatcatacaaggatccatgttgtaaaagaagtcaaaaacatcttgaaaaatgagaacccctctgctagattaacttayagcaacttgcttctggcactgcttcttccatgtctttgtttttatcttttggtactactttggaagcactcatctccaacaggtcttctccaacaggtcttcttccattaattcctctggtgtggtgtctattagctcttgaatttctccaagattcatatgttgcaaccgttcacccctcaccttttttatggttaaatttatttttattttatttttattatactttaagttctgggatacatgtgcagaacgtgcaggtttgttacataggtatacatgtgccatggtggtttgctgcacccatcaacctgtcatatacattagatatttctcctaatgttatccctcccctagccccccaccccccgacaggccctggtgtgtgatgttcccctccctgtgtccatgtgttctcattgttcaactcccacttatgagtaagaacatgcagtgtttggttttctgttcccgtgttagtttgctaagaatgatggtttccagcttcatccatgtccctgcaaaggacatgaactcatccttttatggctgcatagtattccatggtgtatatatgacacattttctttatccagcctatcattgatgggcatttgggttggttccatgtctttgctgttgcaaatagtgctgcaataaacatacatgtgcatgtgtctttatagtagaatgatttataatcctttgggtatatacctagtaatggcattgctgggtcaaatggtatttctggctctagatccttgaggaatcaccacaatgtcttccacaatagttgaactaatttacacttccaccaacagtgtaaaagcgttatttctccacatcctctccaacatctgttgtttcctgactttttaatgattgccattctacctggcatgagatagtatctcactgtggttttgatttgcatttctctaataaccagtgataatgagtttttcatatgtttgttggccgcataaatgtcttcttccgagaagtgtctgttcatatcctttgcccactttttgatggtattgtgttttttttccttgtaaatttgtttaagttccttgtagattctggatattagccttttgtcagatggatagattgcaaaaattttctcccattctgtaggttgccttttcactctgatgatagtttcttttgctgtgcagaagctctttagtttaattaaatctcatttgtcaattttgcatcaaaagcaatggcaacaaaaacctytttttttttttttcatagccacagtctgttccataatttcctggattggctctgtcataaattctgtgaaatcaggcacaacatagtcttctccagcaggaatttattgttttggatttgatggctttcatggccttttctatgatgatgataacatacccaatggtgtaattcttctaggcttttatgatgttctctctattggggttctcttccatagcattgacaatcgtttttatagagtaccacgtgtgaagagttaaaagatccttatgacttgtgatctagatgcagaattagagacattgtgtttgggggcacgtagaccactttgacatcttcagtgttgaactgatggggttctgggtggcctggggcattgcacattatcaaaagaattttaaaaggtagtccctcactgtaaaggtgcttcctgacttcagggacaaagcaccaatgaaactaattcagaaaaagtgttcttatgctggcattattgtttataaaccaaagactggcagcttgtgtttatctttttccttcaaggctcagagattaacagctttatagataaaggcagtactgatcatattcctgactgcatttgcacaaaacagtagagatagcccatcccttcctggctaaatcctagtgctaacttaccttccttactaataaatgtcctttatggcatttaatcccctagaacagggcatttttgtctgcattaaaaatctattcaggcaggagtcttttctcctcagtaattttcttaatggcatcttggaactcatctactgcctcttggtcaacaaaagctacttaccctgttaccttgacatttttaaaaccaaacctcttcctaaaattatcaagccatcctttgctggcattaaattctccagctttagatccttcaccttccttttgctttacattgtcatatatgtcacataatgacttcactttttctagaatcatattagagtctatctataaaaaagcctttcttgtagtaatcctgcacccacagtaaatactgcagtttcaatataagataaaaagatattttgtaaaaagggcagagttttcacatctcctcatgcagatgcagcaagggcttcttggatttcctttacttttttaccaagagctctaacgctggattcatttaccttgaaatggtgggcaactgcagttgcagacctcagtctatgatacatgtcaagcaattcaactctttcttgtaatttaatgacttttctatgcttcttgggagcactttcagcatcactagtggcactacatataggtcccaggatgtttgtcaaggtttacaatattgcactaaacaaaataaaaaatacacaagaatcctaaaggattactttttactgtaatacataatttactgaggagacaaactgctcacgcagagaaaactagtgtcacagggtgttttaggcagacacttgaaaaacttgagctcaccctaatagcaacaggaggtggttatgaaattattgcagtagtatggtatgtattatagtatacatttaatgcaggtataatttaatagtacatcttcacatttgtttacatctctctcagctgcaaatggtgccttgtatggtctgtaatatttgtgtgtgtaaattttgataaatattaactttttataatagatttgtgcatattttatggtagtaaaattttaaaatagactatgtctatatatatttaatgaactcatgacatatctaactttttcctaattttttggtatttctaggtcacatgattcatctgtgagtttttccaaattgttaaaaatctccaaaaacttttctaatatagttattgaaaaaattttcatgtaagtggacccacacagtttaaacccatacttttcaaaggtcaatggtacactactcatggaccagaattattgtcctttatgcatgtttttgctatgggagaacagagctatttactgctgtctctttaatcatggaagttaattaatgataatgtcttataaaaattaatatccagtctttatgaggcagatagtcaaataaatgtccaaattcaatgacaatttaaaattaaacctagawktcaaagtcagtgtttttgaaaggaaatgtagcacacatctaccctttacatattccaggttggtaaactgtatgtattagcaaccatgatttataatgcaatagaaagacaggctgagtttacactaagtgtttctaagaatgaaatttatgagggcaacaaggctgaaaaaaacactttcaaaaatatcattttctttaaaatttaaaactaataaagatgtgaaatactttataattcaaaataaaataaaaacaaatctttctgcaaatattttcattcatcatgagcatgcgttagcataactaacaacagattaacaaaaatgagtagaacattatgacacacctaaatacattatgtgagataaactaaaggacatttcctactacttttcttatatcagttatgccatttgctgaggcaacttgtcaatgatgacatcaatttcatcctaaaagaaatttcaattgaatctaacctctttattgaacaaataaacaaactggagtcttgagggatttaatggctctcccaaaaacatatcataaacagaacaaaagtttgatttttgtcaaattatcataagacaaactaaagtgacaaatcccctatcataagtgaattaatttttaagattatatgcagactctcaaagtgtcttttagatccatataaaaagtgaacatgtgttcactttcaggctttgcccatcaggctattagatcttaggcaagacccctaagttcctgagacttcatatactaaatacagtgtatttataatgaggatcactagagatgtgagaattagggattgtaaagcaaagtgccagcagtatctgctacatagctatagctcaataactggtcatcttggaaaatctactacttaaagtaaggataaagaagatcataaaatgtaagttcttgttttattttatattttccctgtcttttctgtactatcatctagtcatatgttgtattcctttcgtcttatacatctacttcacaggtcatgttgttatttacattcttaattccatacttcagtggcctcttctcactgcatttttattggatattattcataaaatatgcagagtgtataaataatatggagctgtaataatatggagctgtatgtattctgagtttaaaggtttttgttaacagctgctaagacccacatctaatttaggatgattcatactgttagaaccatacacgctataagaagaccaaaattctcttggttttaaaatgatattattatgtattattattaatagtattagtaactcttgggcatgaaagaataaatttgagtgctaacacatattcttgagttctgtataaatttaattttattagttctgaagataagatattaaaaaagatgccataagggagatatgaggataatcacatcctgacagcttcttgctgggcttgtttcctgctcaaaaagacytaatcaaagtttattaagtaaaattcacagcagtagtgcaagcatccaataacatgtatgcaccatgaaaatatataacatattatagaacactgccctttcaatcagaatttggagaacagtgcctggtactttgtcatctacttcctctgtgaagacatgagaaagctgctacagcttcttctcaaacttctgtgactcatatcttggggactaatggctggtggacatccttgagggctatggcagcaactgtgggtggtcctggtggctataccagttatcagggtcacatacaattttagcaaaagcttactaataattataacactagtagtttctgtttattaaattattatgaattaagaattgtgccaagccatataaatcatctgatataacctcagtacaaatatacaaaataggtcatattattattaccattttayaaaagtgaaaggtgactatgattaacttcattaaaagctgagagctagtagtggcaaaaacaggataagggctattacaaaatcctaaacccttggccactgcactgtactgcttctgcccaactggtcttaactttattatattttaataaatatttttctaagccaggtgataactggctcaggaactatacattgcacttgatgttcagtctaggatatccctcgtgaaattgattcctgtctgttctgcagccttagctactgaaaagttcaattatttagaatacaatagacttatttattaatttctgtgtctaaggcttctgtctaaaatcattttcaaacttggaaaagtactttaaattttccaagatttggggatatgatgaaatttcttttttgagtaaagactacactataattttctccacatgcatgaaaggcataaaagatgcagacagaacagaaatcaaaggagcatcacagtagaaaaactagtggcaagcaaaaattcagcttcagtaaatgaatagttgattcatcagactttttctttgaagtttgatctaaaggaataacaacaaaatgaggcgcagagggggaaaaaaacttgcttcaacaagagcaaaactaaatctaaattaggtaattttctcttttttaaataaaccaaaaaagccaacttcaggatggaggtayagttatgcaagaggaccatttctaggagcttaaattagaatagaggaaatccccatttttaaaataggctgatatcaaaggaaatgtcccttgattcagtcatgacaccaatgtgatcagatgctctgatcactartgcactccagggcaaagtcatttgacatttccttcagaaatacagagagatgtttggaattatttagaagaaacagcctcatttgaaaattgtaggtctgtcctggctgtgagaagaatgttaatcatgcccatttggggaaatttactaacattttgcatgtaaatggaatttagttaactgaattttctgaatactcgggacaggcaaaaacttctaaaccacctggggcttggttagcttgaacctgaaagcaaaggaaagctggttgtatgtattccacttatttatcaaatatttactgagctccacaactgacaatatgagagtggcttaagggagtgacctcagagttttaaaggataaawaagagttttccagaaatatgaaggtgaatcagaatcctaggacgaagtaagagcaggtaaagtgagtggagaaataatcaagggtctaactattacctgaggttcttgaatcacctacactaaaattacctgaagtgtttgttaaaaatgtggttactatgccttttctcatgccaagtgaatcacaatcaatgatagtaggaagcatttataatagacatacctcagctgcttttataaacattaagatttgagaattgttgctatttgtaatagaagcatatgcattcaaacaacagaatttcacaatttgttttacatttacaaaggctatgctagtggcctatggatagttaagaaaaaattgcacgtgacaagagacccatttcgaagacagatgcatggatccttactttctttctcttttcaacctacttcattctggcttttgttcctaagctctcgcttgcccaggttaccaaggatctttaggctgccaaatcattcattctcaacctgaatctcagcaggacttgaaaatattgccctactckaaaacacttaattttcttggctctcaaaaaaagacttagtatttatttttttcagcctcctcttcttttactttactgaatccttcagaaccctgaactcttttcctcctatacttaatttttgaaacagtagctttaaatgatcagccatatgatcagacctccacatatctatctctaagccctctctttctcttttgctttacacttgtacattcaaaaatctactcgaaatctctactttaaagtctactggagtcagccacaatggctcacacctgtaatcccagcactttgggaggctgaggcaggtgatcacctgaggcgaggagttcgaaaccagcctggccaacatggcaaaaccttgtctctacaaaaaatattaaaaaaaaaaaatagccaggcatggtggcatttgcctgtaattctagttacttgggaagctgaggcatgagaatcccttgagcccacgaggtggaggttgcggtgagtggatatcatgcactacagcctgggtgacagagtgagaacctgtctcaataaataaatacatacataaatacaaatacataaataaagtctattgggaatctcaaatgttttatgtttaaaagggaatcccctaacccaaacctgttccttccctagtcccacccatcttggataatggcactcacacttcatcaggtcaatgcaaagtaatcatccttatttcctttaactctttttttttttttttttttcatatttcatggctaatccatcagtaagcccgctggcactttactttcctatatcccaaacctgacaacttctcaccaactccatggctaccattctaattcaagctgccagcaatccctcttgcctagataatggcagtagtcacctaactgatttccctgcctgtatacttgccccatatggcaaagtttccatagttactctgagtgatctttaaggacatagatcagaaaacgccgctatcctgctcaaaatctttcaaagtctatcatccttaaaataaaatccacagtacttaccaaggcccacatctctcttagcaacatttccctatacttagactttgcttatactgtttcaactacagtggtcttgctgttaaacacactaagtttgctttcctttggagactggtatttatggttacctctggctggaatgctcttttcctagatatcagcatatttttctgcctcattttattatgatctctgctcaaataaaacttcctttaaatgttcttttatgaccaccttacttatacaattctctctcctccatattactctatattcccttaccatgctttattttattcatagcattatctccacttaacactgtatcttgtagatatttacttgcttatatattgtctctctttcatatagaaatatacactccataggagtaagtacattatctcacacactttttttaatcccctgtgcctggaatagcctagtacataaaaggcagacaaagaatatttgttaactgaatgaatcttttgtatgtaaaatgttgaagcctttaacaatggcattgtgagtaagggtgatgagaaaagagaaaaggacgattctgctctgtaaaataaagtcattttactatattttactattattatagtataatatgataagatgaaaaactagaaaatgtaaaaaatgtcagcacatctattatagaaatgactatacaaaggataaaatggttaatctacccaaaagaatgggatatcagcagatttgtgtttgaagcattcttgaaagtggagtttgtacagaggaacaggaggtgaaggtgaaaacaaaaggggaagagatgagttcaacagacattctatgtatagagactgacattaaaaatcttggagatttggcaaagctgaaaataattaatcgtactaaaccatgagatagaaaattagggaaaattgtaaagtaagcaataagkgtggaaaatacatcatatcccaggctatttgtacccttgaagaccatatataagttgctggattaatctaaaataaggattgaggggtgttggagagttttaatcagagacaggaatccatactggatgtttgttgctcttgtcactgcagaactgaatagatttgagaagtaccaaagagtttggacaggttcccaactccaattattgtggctgaaatggaacagataatayatcttcctgctcctcagcagccaaggcaagaatatatggcttagattcagccaactggctgcttgattctcaagggacagagtctttatggtgatrgtagaagtgatatggtttggctgtgtccccacccacatcacatcttggattctcatatgttcccattccctcccatctcattcagttacctttttttttttttttttttcatctttcccatgggagggaattgaatcatgggggcaggtctttcctgtgctgttctcatgatagcaaataagtctcatgagatctgatggttttaaaaagaggagtgttcctgcacaagctctctctctattcctgctgccatccatgtaaaaggtgacttgcttctccttgccctccaccattattgtgaggaccccccagccacatggaactgtaagttcattaaacctctttcttttgtaaattgctcagtctcaggtatgtctttatcagcagcatgaaaatgaacttattcagtaaactggtaccagtagagtggggtgctgctgaaaagatacccaaaaatgtggaagtgactttggaccagggtaactaacaggcagaggttggaacagtttggagggctcagaagaagacargaaaatgtgggaaagtttggaacttgctagagacttgttgaacggctttgaccaaaattctgataatgatatggacaatgaaatccaggctgaggtggtctcaaatcagatgtggaacttgttgggaactgaagcaaaggtgactcttgttatggtttagcaaagagactgacagcattttgcccctgccctagagatttgtgtaactttgaacttgagactcgcaatgatttagggtatctggtggaagaaatttctaagcagcaaagtattctaaagaggtgacctgggtgctgttaaaggcattcagtttcataagggaagcagagcatgaaagtttggaaaatttgcagcctcacagtgtgatagaaaagaaaatcccattttctaaggagaaatttgagccggctgcagaaatttgcataagtaatgaggaatcaaatgttaatccccaagacaatgggaaatatgtctccagggcatggcagaggtcttcatggcagcccctcccatcacaggcccagaagcctaggatgaaaaatgatttcatgggccaggcccagggtcccagtgctgtgtgcagcctagggacttggtgccctgcatcccagcagctctagcgtggctgaaaagggccaatgtagagcttgggcgatggcttcaaaggatgcaagccccaagccttggcaacctccatgtgttgttgagcctgcaggtgcatagaagtcaagaattgaggtttgggaaccactgcataagtttcagatgtatggaaacgcctagatgcccaggcagaagtttgctgcaggggcaggtcctgcttggagaacctctgctagggtagtgtggaagggaaatgtggggttggaggccccagacggagtctctactggggcaccacctagtggacctgtgagaagagggccactgtcctccagactccagaatggtagatccactgacagcttgcaccatacgcctggaaaagccacaggcactcaatgccagcccatgaaatcagctgggagggaagctgtaccctgcaaaaccatacaagcggagctgcccaagaccatgggaacccacctcttgcatcagtgtgaactagatgtgagacatgaagtcaaaggagatcattttggagctttcgactgccctgctggattttggacttgcatggggactgtagcccctttgttttgaccaatttctcccattcagaacagctgtatttacccaaggtctgtaaccccattatatctagaaagtaactgacttgcttttgattttaccataggtggaagagacttgcctgctctcggatgagattttggactgtggatttatgagttaatactgaaatgagttaagactttggaggactcttgggaaggcatgattggttttgaaatgtgaggacatgagatttggggccgggggtagaatgatatggtttggctgtgtcaccacccatgtctcatcttgaattctcacatattatgggaaggacccagtgggaggtaactgaatcattggggcaggtctttcctgtgctgttctcatgatagtgaattagtcttatgagatctgatggctttaaaaaggggagtttccctttataagctctgtttttgcctgccaccatccatgtaagttgtgacttgctcctccttgccttctaccatgattgtgagtcctccccaggcatgtgaaactgtaagtccattaatcctctttctttgtaaattgcccagtcttkgatatatctttattagcagcatgaaaatgaactaatacaagaactatcaagagtccaaggctagggtggccctggactgcatctgtgcatctgtgtattgcagcaacactctggggtactgggcacagtttactggtgtattcagcacagcattctcagtcctgggactttaacaggacttttgagctttctataatacattttgtaataaactggactttgcaactctcagaagccaccaaaatcacaggtagatacacactgggggagaattagggaaagaaatctatgatgtctaacaaagcttaaaggataacttttgtgaaactttaaagttttgtgaaacttgatgatagggaaagatgatattaaacaatatcctagtgattttgataattgaacaccctacatttgagaattgactttcattatatctgtggtggtagacccatagttgaaaaatgtctgacagattagtagtgagtgtagactattcgataagatgcctctaccataaaaatctaattttctatattgatcatattagatagaacactgtcatatttccactttgtcttatatatacagatacaacttgatttgctacctcatagaagtaaagggctcacctcttcaaggttaattaagtttttctgttaacctatagtccaatggttcacaaagagttctcagaaaaagttagatgcactcaaatataatccatgctacaactagacccagtaacaataatttaagtatcaagtaattttcaaggtgtctctccatataattagtttcaattgacaccatcataggactgaatactttaatgttgaactcttctgtggaacaatattccgtctttaatcattacactgctaaagcacagaactttcattcaagtattgtatattaataataattattcctctttgtgtttatgatcgccctaaataacaacttttatttatttattttattatactttaagttctagggtacatgtgcacaacgttcaggttaataacaacttctaatagtctgtatttatttgaaatttgctctcatgtttaaatatcatggatgagatcatttgcctaaaaacattacagtacactgtgtattatcccaccctgcccaatattttagacatcttcaatatctattgcattggaaaacataatttaataagcatcagtggaacattattatttggcaagaatagattatatgatgctattaatatcatacaaactctgtgaaagcatgacattttgtattatttgatcattttaatggattgattatagctaaacaactttgtgtaattcttagcagtttaggataaactgattcatttaaagagactaataacatttagaagtaaaattctagaggtaaagaaaacagatttctgtttaattgttaaaagaaatggcacacattcttttcatgcaaaagggactgtgcagaaaacagttttcttctgaataaactgaccgtgttcatgatttaacagaatcagttactttgcaattgattctgacacagctagtatttgaactttagggactctaatctcaggattttacctaatggtacatatgaatcactgagagctactacaaaacatgcacattrtgctcaacaatgcttttctttgcattaaagaaacattctttaaggaaggcattatgaaagggttcaaccatggccttaaaaaatgacaggatttttcataaaatacaagaactgggggaaactcaacactttgtaagaaagatcattaaccaaatggctgatgtagcacatagcaataggactggctaggcactcatgagctagggtgaaagtttgatagtggaacatgttacacataattaaatatggatccttcctaatcaatagtgagggcataattacttttctcaaggttagttaggcagagtttttggaagagacaaaagccagaataaagggaatcaagaagacaaactaaagagaactgtatttgagagctgagcgggctattaggagttttggcacacttgaaaaaccagactgcaattttatcagtagtctcatcagggaactattagacaaggtcaagaaggcctctgagaatagctaggtacatttaagcaatgccttcctgctccaccaagttgctcaatcatagctgccaaattttcatgtctttgaacaaaagcatcttatatgaacatctcgttaagctgctgtccaattctgtcttttaaagaatgccatcgtttctctatggaaactataaatgactgatcaatgcatgtttccaacagtgatggaccaaaacagttcaaatcactgactacaaatcatgagggaaagaagtatgcacttaagtatgtgtaggtgtttggaaatrtggcttcccaaaaccagatycttgcgagggaggaaaaatgaagaggaagagtatatcagctcagtcccttcaagcatgtagaccagttagctttctcataaatgttgctaaatattatatgttgtgtacttccttcctttttcccctcaattcctaaatatatattgtgtaccttctatgagccaaatattaaatataggagatcaagaattaattctaaagatgtaaatgataatgatgttagtagggccaattatgtgtctgccaggtggcataagatgaccaagaagactccatgttaaacaacagtgacttagtcacagaagactataagagtatctgtacatctggcttttggtagatcaaaggactatgaaggacttttgaatttattccaggaacaaataatgtgagtttgcatcatagaaagataatattttcctgaaacttatttttccaaacatatttgatgaaatttcttacttcagagagactttttcaagaaacttagagcattctaaaaattatctaagattctaacaaacaaatccctttaacttcttgcttttctttcttttattttcaaaactttaacctgttcccttaagagacatggaaaaataattcattatttttataaaaataaatatattgagcaagtatgaagtggtcaaaatttgatctgagataatacatttaaaaagcctttgaaattaaataaagtctaaaaaaaagatgctcgggtattatttatgccaattggacctggggatcagaaatcagtaagtaccttagatgccttagaaagacccatgcatgccagaggttaaaaaataaactctaagaaagtctaaaggttatatcagccagtaatctccagagaaagagaaccaataggatacatatacaaagaaagagatttgtttttgaggaactgtccatttctgttgatttttcataactctatcccttcaaatattgcttcattgacatgttttcaatgaaaccatctgagtgaaaagctgtttcctgaaagactgactgagaaactctcaggcccagagagtatatatttgtatatctttgtctcacccaggcctaatactgaggcaggtatttgtaaggtagttgtgatattgtgctataataagatatatatatatataattttatatatatatggcttctgttccttgttcttaaaagagagctcctaaaagtccttatttctgagcaatgggagatgctaggtgcatcttttgttctaatatctggtttttgacctccattcttgacaaggagctcctaattctttggaatttattgggtaataggagcatcttttgttccaatgaggtgactcttggtggactcctggctgggggctagtcatcggagaaacctagacgtggttagaagcttgaaacttttaaacctaacccccatcctacaggaagaggcaggtgctggagattgaattaataatcaatccagcctccaatgatgaaacttccataaaaatcctgaactgcaggttttggaatgcttccaggatgctgagcacatgaggtgcatgaagtgtggtgtgtctggagagggcatgagagctcccagtcccttgcccctactgggcctatatatgtcttctatgtggctgtttatctgtatcctctgtaatatccttagtaatacgtggaaatagtaaacaaaatatttccccaagttctgtgagctgctctagcaaattactggaccttggaggaggcagttggggaaaccatgattatagatggttgttcagaagcacaggctacaacccagggcttgtgactggcatttgaagtgggatcagtcttgtggagtgaggtcagtcttacaggaatgagcccttaacatgtgggatctgacgctacctccaggtaggtagtatcagaattgaattgaaacacaggatcccttctggtgctccctggagaactggttattgatggggagaaatttccacatgtattgatgaccagaagttcatttttttccagaagaccctaacctacatttctaacagggtggtagattaaatgatgtcctaaaggacatgaatgacacatttattttgcttaatcctcatattaactctgaaagagtttgacagataagaaaacagagactgcaagagattacttcggtaaagtgaaacgactagtaagcagcagcatagaaatctggacccagatctgtctgtattccaccatgcataataaacaaacattcattcgttttttttattttgaggtaggtaaaaataattttactctattctgtatgaaatacttgatatatatgcaagaatccctaattcactgtcagtcctccttttgcccccaacttgccacacatcatgctatgtgggtgattcacaagattcaacaaattgtccccaaattagcagcactaattcactgggattgaacaggtagtatttggagccactttactggtatacttgcctcacaaaagaaatatgtccttttttggggagaagtatgttgtacctatttcttttttttcctctttttttttttttttttgagatgtagtcttgctctgtcaccaaggctggagggcagtggctcgatctcagctcactgcgacctccacctcccgggtttaagcaattctctgtcttagcttcccaagtagctggaattacaggcacctgccaccacacctggctaatttttgtatttttaatagagacagggtttcagcatcttggccaggctggtctcgaactcctgacctcgtgatccccccagctcggcctcccaaagtgctgggataggcatgagccactgcagccagctattgttcctatttctttagatgtctcttagccctaaatcactgagaaaaataagcatgatagtaaaatagaatatgatgatattagaactaatgtcacctctgaaagtagaaaaagagccaataagattttttaaacttgggaatcttgttggtaccccattatctgtctctaaagtacccgatcaagaatgaaacctgtatttctggtttaatgtgagaaatctagtagtatgactctaaaatatttccaggaccctcttatttattgttatgtttatttgtactactgtaataactaagtgtacagagccttaaaagctatcccatagctgctaccttgacacatggcacatacaatagatgggcatgggtagaaacggaataaaatcaccaaactgctgtctcatttcctaatgggcaacgtgacagtagtctagattggagccttatcttgtagcttcttttgacacctgaccaaagggggccaaaagcatggactcacattaraatcttcaatttttccagaaggccctgattcacatttctatcagggatggtaaattatgtcctgaaggacatgaagggtatccatgtgagaagctgcaaaagcagtcagtttaaagctgagtaccccacaatcagcaagactgtctgattagaagacccaccaataagccattagccacgctttgcttcatttctgtgtattctaagttctacctttccccctttccattttataacttgacactgttttttaagaaaaaagctgtacttctatgttcattttctttattccctgaacaattttttttattatactttaagttctagggtacatgtgcacaacgtgcaggtttgttacatatgtatacatgtgccatgttggtgtgctgcacccattaactcgtcatttacattaggtatatctcctaatgctatccctcccactaccccccactccacaacaggccctggtgtgtgatgttccccttcctgtgtccatgtgttctcatggttcatttctcacctatgagtgagaacatgtggtgtttggttttttgtccttgtgatagtttgctgagaatgacggtttccagcttcatccatgtccctacaatggacatgaactcatcattttttatggctgcatagtattccatggtgtatatgtgccacattttcttaatccagtctgtcattgatggacatttgggttggttccaagtctttgctattgtgaatagtgccgcaataaacataagtgtgcatgtgtctttacagcagcatgatttataaaccagtaatgggatggctgggtcaaatggtatttctagttctagatccctgaggaatcgccacactgacttccacaatggttgaactagttgacagtcccaccaacagtgtaaaagtgttcctatttctccacatcctctccagcacctgttgttcctgacttttgaatgattgccattctaactggtgtgagatggtatctcattgtggttttgatttgcatttctctgatggccagtgatgatgagcattttttcatgtgtctgttggcggcataaatgtcttcttttgagaagtgtctgttcatatccttcgcccacttgttgatgggtttgcttgttttttttttcttgtaaatttgtttgagttctttgtagattctggatattagccctttgtcagacgggtagcttgcaaaaattttctcccattctgtaggttgcctgttcactctgatggtagtttcttttgctgtgcagaagctctttagtttaattagatcccatttgtcaattttggcttttgttgccattgcttttggtgttttagacatgaagtctgtgcccatgcctatgtcctgaatggtattgcctaggttttcttctagggtttttatggttttaggttctaacattgaagtctttaatccatcttgaattaatttttgtataaggtgtaaggaagggatccagtttcagctttctacatatggctagccagttttcccagcaccatttattaaatagggaatccttccccatttcttgtttttgtcaggtttgtcaaagatcagatagttgtagatacgtggcattatttctgagggctctgttctgttccattggtctatatctctgttttggtaccagtaccatgctgttttggttactatagccttgtagcacttattccaaaattgaccacatagttggaagtaaagcactcctcagcaaatgtaaaagaacagaaattataacaaactgtctctcagaccacagtgcaatcaaactagaactcaggattaagaaactcactcaaaaccgctcaactacatacaaactgaacaatctgctcctgaatgactactgggtacgtaacgaaatgaaggcagaaataaagatgttctttgaaaccaacgagaacaaagacacaacataccagaatctctgggacacatttaaagcagtgtgtagagggaaatttacagcagtaaatgcccacaagagaatgcaggaaagatctaaaattgacaccctaacatcaaaattaaaagaactagagaagcaagagcaatcacattcaaaagctagcagaaggcaagaaataactaagatcagagcagaactgaaggagatagagacacaaaaaacccttcaaaaaatccatgaatccaggagctggttttttgaaaagatcaacaaaattgatagactgctagcaacactaatgaagaagaaaagagagaagaatcaaatagacgcaataaaaaatgatgaaggggatatcaccaccgatctcacagaaatacaaactaccatcagagaatactataaacacctctacacaaacacacttgaaaatttagaagaaatggataaattccttgacacatacaccctcccaagactaaaccaggaagaagttgaatctctgaatagaccaataacaggctctgaaattgaggcaataattaatagcttaccaaccaaaaaaagtccaggaccagatggattcacagccgaattctatcagaggtacaaggaggagctggtaacattccttctgaaactattccaatcagtagaaaaagagggaatcctccctaactcattttatgaggccagcatcatcctgataccaaagcctggcagagacacaacaaaaaaagagaattttagaccaatatccctgatgaacatcgatgcaaaaatcctcaataaaatactgggaaactgaatccagcagcacatcaaaaagcttatccaccatgatcaagtgggcttcatccctgggatgcaaggctggttcaacatacacaaatcaataaacataatccctgagcaatttttgaaatggatttatcttttattttgatattcactacattgtgatttccattaatggataaataagaacttaatttaaccaattaatgccaatgcatgaaggagtaaagtgacttgctcaagattagggaataactcagaaacaaaatcaggaggattctagaaaataagaaagtactcaaaaaaaaaaaaaaaaaacaaaaggttggtagatgtggaagggacacaggagacaatgtggaagagcgcttaatggcctaagctggaacaattcaagcactaaaataaaaagcagattatcggattaaaacccaaagtaagaaattaatatccattaaaaaatatcaaggctgatacaaattaaatggggaagaaggggaaaatctcttatacggaagaggtccaggtaatttatgtggattggttatctatttctctccaagagatggaaattgacacctcctgcctcttttccccactaaaatgtgggtatgcttaataaattacttccaaaaattgatataaaatcaggtggaaaacaaagaatgattttacagtggagtaagctggcaaatactaccttgatcagatggtcaaggttagcatcatgagtgataagtaatgtgtccttgatatgatgtgacaagaatggctctttacctcagtggtcttcttctcaaaaaacccataatcccagtctaaaaacgagaaaaacatcaggtaaactcaaaacgagaatattctacaaaatgcctgaccagtactattcaaaactgtcaatgtcatcaaaagtagataaaatataacaaactatcacacaccaggagacataatgactaaacataatgtgctatcctgaatggggtcaaggaataagaaaaagacatgaaggaaaaactagtaaattccaaataatttgtggaggttagataatacttatatgccagtgttggctccttagttgaggcaaatgtaccacagtagtataagatgttaacagtagaagtaactaagtaaggggtagatgaagtctctctgtactatcagtgcagctttcttgtaaagacaaaactactctaaattaaaaaggttattaaaaaaatcagtaaaaaaatcatggtgaattccagaggtctttatagtcccaaccagtttttcatatgggatgtattttatttggttggttggttggtttttaagtgtattactgagtaaattctttgcagatttccattgttcagcacattctagtactggacacaaatgtttatagaatggaataagtgaaatagcacttagtacattgcctgatacaaagtaaactctcaataaatatttatcagttgattgaataggattacaaattattttccaccatagcttagggtacttattacattgtctggtttctgatgtaataagtagatgggcataagtgagagggttttaaaatatggacatattaatccccgagaaccatactagtaagaatcaataagtaatgtagtatattagtcattcgatgaagtacctcatcctgtgaaatggtctctcggtttatcctggaggagatttaagaaaggtccacctaatcaaggtgattgttggggtggtggggggtacagtcaggagcacataacaagaattgaattgatatgaaataaatataggtggatcaatgatattaatattcctgaagatagttagcctgagtgtaaagaaatgggagtctgagaagaaaaatttgtcaacatttccccagcactctccatgaatgcctcaggccatcatagtttgatgtcattaactatcaggttcattcaactaaccactctccttgctctgattaattttatttcctgtgtagattgttttagtggaagacagtactcttgggtcactttgctagttatagttctcatggcacatttgtaaatttgcattctagttcacccactagtttcttggacatctagttaatctagttttttattcaccaaatatatataatattattatgtatctcgtacagaagtcttgaacttaaaattagtgataaagtgcatatgttttgcttattagaatgccttacatagtacccattaattcttcagatatattattgttgatttttttaattacaattggtcttttgttgctgttgtttttgttgctgctatgaaataactttccacctccctcctgaatttgagccattctgacaaaattgaatcccttaacttacaaatcggagaattagattatcagtcaactaccctgtgatagaatgcaactttgattgttctgctaaagtagccagttaatttgcccttcatgctgctgtttctgttttctcttttcaacctcagcatctgasgatcatatactcttgaaacactcatgagagataggaacaggtagataaggctactttatagggacctcttaattcatcacaaaaatgaggtgcctctggagtggaacataaaagttatttaaccaacaggtttagcagccgtgataaatgatgtgtgtkatttaaatttgagtagaattgtgtttaattgaaaatttggccactgcatgaaatcttcactgcaaagattaggatgacattgaagaactgccatgggtgctaagaatgtgaaataaagagccacttaagttaatatttcataaagcagtcagtgttttataaagcagagttctagaaaatatgttcyggtaccactttcatcagtatcacctgtgacatgtgttaaactgcagccccttggcctcacagtactactggatcagaatctccttacgggggaatgcaggaatctgtgacttttttgaggtttactggtaattcttataagccctacagtttgataacctggttttgctttataaattgagagagcactttgatactagtgtgctagcagattttattcacattggttacacatttccaggaagtcttgaatttaaaacttactgggcaaaaagggggaacatatggtgttcaggtactatgctttgttaacatttaaaataaaatatttttagagtatgttttgtaaactaaaaattatagtcagcattttaaataactatgttttaattacaaaggctttttggtacagaaattttcctcaatttgcatataaatagctaggcaaagtgtctgttggagatgcacagtaatttaactaagcctgatttctctgttttacaattgtcagaatctttctatgtttgaggttgcttttctttcaataaacattatattgaacacatatcaagtttaacctcattgatagctaacttgatttaattaattttcccaggtatacacttgacaacagatttgctttgttcgtgatccaatatttgtagtctttgaaatatttctgtgaatcctaatatgtatttgtgttttcagcttctacagacgctattctaaagaaaaatgcacaagactggcttatttgcaattaaatgtctgctctaacaccagttcagtggaacccattgcaacaataagccactgaaaacttaatcataaaaatgatttccttctggtcacactaaaagagtggaactttgagtctgaaaaacctataatatatcacttactacctgtataaccttgaatccagtctgtgagctttctgagcctcagattgcatacctataaaatgggttgatgaaataatatttgtaaaatgcctggcacattcctaaataaagaatggcagggaaaaggataaaggaaggagatgtgaaaatagtggaacattggtgggagaacaggctgtaacttctgagtcttcacttcatacacacaatgcagaactcttcatttctaatgtgggacatccagactcttagtgagtgcggaaaccattacattatgaaaaagataaaaggaataaaagtcatttcatggcacagctagaactccttagtaatttcatgatttttgaattgtaaagtgaataagaatgttagtaatatttacttcaagaaacatctccattgtaccatggttgaatgaatttagaattcttaataaaggtactatgctgtaagaaatagcccttgatgcagctgaccttatatttyctgtgttacttttttattctttgactccatttcctgtctcttgcctcacacataatgagtaaaaactgcttctaaattttatattgtgcacattatttcttaacatttttattttcaccaaaaaaagaacaaaatgccatttaccaagcagaagaggaagagctaaggatttttaagccctacaaatttttatagttattagaatcattactgcactttctcaaaaactgctattttaaggaaaagggcctcaaaccttttcctgatacacagtaatatcagttccctattaaacatgttaacataactgaattggtgactagtttttacaaaataaggataagtgaaaggtaatactttgtgacactgaactggtgctgtcttaagtaacagtactttgttctttttacagtatttttgaacaatccgtgtaccccactttaattcagaatcaaataacaagagacaagggaacccactcaaaagaggttttcagtatttggaatgagttttaatgtatcagaagaaagaggaatacactgatttgataattagcataaacataaattagaatgcaagtggttttcaatgtaggaaaacttgctgactcacactgaagtatgaaataattttggacaaagtgagaataaagcaaggaactagacctatagcactctgagaaggaagaaaaacattttgggataactccaggaaaagttataagattggagatttggagtagaatgttttgttttccttgtgttttccagtttttccattttgttcttgttatatgtttgtatgcaaactttgctccaattttaattttattagaacacattttcagaactagaattattaatggaaaatttaggattgctacatgctgcacagaaaaatgttgccaaagttcttaccaacataatgtctgagaatgctggtctgaccaaaaaatcattaatatttagcatgctacctaagttattgcaaattatgtaaataaaaattatctcttattatgtgattgctaatgagatatcaagtatgyattaggaatttatagttctataaattatttcggagtaatgctcgtttttcaacttgagaattagcatttttttgaatctctgaattttctttatgtattaaaggtgttactctttatgactcacataaagagttgcaaatgttttctcaggtttgtggtttgccatttaaagtgattttcataatattttatatatttaacttgtgtctttgaaaaataaataaaacatcagaataaaagttatttaaagcatgagtttgcctattctgcactgagctgtatctttagcctctagcccatgcctagcaactaggagattctcagtaaatattttcagatgagcctttgcaggtattacacctttggttattaataattctagcaaaaatagaattctatggaaaattaaccagtagttgccttatcttttatccctttaatttcactcttagaagtccttaattataacataaacattttgaaataaattactgtgttttactcatgtctgtatacttcagagagcttattacagtggcttttcatacatatttatggaactgaattcagtgcaaagaaaaaaacccagccaaatagaaacataatattttctcccccaaatcattatctttatcaaagctctaataattattttttgacttcatattctgtgctaatcacagaattttctctgatttattggtcaggttttctggaggcaggcaacgctaacaaaatttgtctgtctaagagaaaaaggaaattttccggaaatgcagcaggggtacacagaataaacagcctggaagttgcagtagtgagactgaaagataataagattaacccaggttgcttgagagctaacatgtaaacaataagattttggtcaggatgatgttggaattcctgagaaacatcattgttgatgctgtgaattagattctaactctctgtttctgtgtcactaaagcaaaattcaaagatgagaatacaaatgtctaactggccaaacccagggcacatgtttcaccctggtttttggagggcaggaagagggagaatttgccccagcctctttcagtttccataggactctgtgtaagatggcacagtgcatcattcaataaagtaggcaggggtattggaagctggacagaaaaaatgataaatatcttatagaaataggcatgttggataaaacacatatttttctccttggagcttatcatttgagagaagaaaaaactatcacagatacaaatataatattaaaactgtgataagggaaattaaagagaatagtttgtattattatatatacatgtgtgtgtatataatatatataaaatagatcaggatttttttaacttgcaagtgacagaaatctagcctttacagatcatgctagcttgcaacataaaggagctgatatggtttatctgtgtctccacccaaatctcatcctgaatatccacatgttgtgagagggacccagtgggaggtaattgaatcatgaaggtgggtctttcctatgctgttctcatgaaagtgaataagtctcatgagatctgatggttttaaaaacaggagtttccctgcataagctctcttctcttatctgccaccatatgagatgtgtctttcaccttctgccatgattgtgaggcttccccagccacgtggaactgtaagtccattaaaactctttgttttgtaaattgctcagtcatgggtatgtctttatcagcagygtgaaaacagactaatccaggaacttatcagctaacttacctaaaatgtccagggttagstctggctttgcatatgactggatttagtctcaaacagtgtgctacatcttggttgctctgtatctaactagaaactataattagtttataatatttctagtgttggctttattttcaggcagccatttccccatttgttgggaaagctgcttctccacaagcctcaatgaaacaaaatctttacacttgaaatcccagaagatcaaatgccagagatctgggataaaatataaagaaagaataaacaatccagagggatctttacatatatctagaagtgatgattataaaggtcaatgagaaaactgggtgaaaaattttcctcactgcagagacattgagaaaagatcagcctctcagcctctatgttcaaagagtttattaaacttaatatttagagctgggaattccagaatatctgaatgaggaattctgaaaattcttttccccaaatacaatgactacatcttcaaaaaaaaaaaagactaaatcttccccaaaagtttggaagtttggatatttgccaaatgcataaaaacaggaagagaagtatttattcaagaaaaatgactcattgtaagcactgtaatagagtatgtggcattgtagcctggggcaactcaaatcatccccagaccagatttgtggtattctagttctaccaggataaggtagactgtgaagacaatggtcctatgctggagagatgacttgatttggagcatgaaaaaactcaccgtgaaagtgctatcaaacacaatttgaccttggtggcaaaaatcagggaaggctaacattgcagttactctgagattgtgatacacacggggaatacactagatctgcagatcatctagaaactttacaggaagagttggggaataagttagttatagaagaacttgatatgtgccatgtatacctggtagtcagaaaggctgcatacatgctggggagagaccagagaggatgactacatagaccgaacttgtactcacagaaaggcaatgcwtgagaacacttgaacgtcagctaaacactgtatatctaaacattgtatgcattctccaaacattcatcagcaaaagttagaaggtataatagctcaaggcattcaagcataacttctgaccaatcactgactgaataattagctatatggacccagatgtgaccccaggaaatctagttttaaaaataaaaatgaggatgacaacgataacaaaaacatgaatagaggtatcagcaatacactacagaattgactctatagaatcagtccaaaatagtcactaaacaaacaaaagaaaaaaaagaacaataacaatccctgagggggattcagaatccagagttgattgtacgtatagcctaaaatgaccaattcttaagaaaatttattattattattatttgagacagagttttgctctgttgcccaggctggagtgcagtggtgcgatctcagctcactgcaacctctgcctgccaggttcctgcaactctcctgcctcagccttctgagtagytgggattacaggttcacaccaccatgcctggctaattttttgtatttttagtagagatagggtttcaccaccttggccaggttggtcttgaactcctgacctcaagtgatccgcccaccttggcctcccaagtgctgggatyatgggcatgagcaaccatgccaggccatttaacaaaaattattaaacagacaaagacactggaaggtgtgacccatatacaggaaaaaaggcaatcaaaagcaatagtttcttaagagatctagattttcgtgagagaagacaaaaattcaaacaactgttgtaaaaaatgttcagtgaactaaaggaaatcacattgaaagaattaaaaaaaattgttataacaattactcaacttgagagtggaaattctggtgttgaaagcctaatagcttaaattttaaaaatcattataaagactcaacagcaaactggagccagcaaaagaaagaattggaaatccaaagatataccaatagagattattaatctgaataataaaaataaaaagaatgcaaacaagttaatagaacttcagagaccttggaaaaccattaagtgtaccaatatatatgtaatgggagtttaagaatgagaggagaaaaagaaaagggcacaaaaatatttgaagaaatattggctgaaatatcccaaaattgataaaaattaatctacacattcaaaaagctcaataaactctacacaggataaataaaaagagaaccaaacttagacatatcatagtctacaagtaaaagccaaagacaaagataaaatcttgaaatcatcaagagaaaaatgacctattagatataaggaaatcacaattagatagccaatgacttcttatcagaaacaagggagattagggagacaaaggtggagcaagatgctgaagagaaacctccaatgattgtcccccaaccctgtatgaacatcaaattgaacaagtatccacacaaaaaaagcaccctcataagaaccaaaaatcaggtgagtgatcacagtacctggttttaacatcatgataaggaagaaggcactggagaggttataaaagacagtcctaaatggcctccaccatgcccttccactccccaacagtggccatattttgcagagagagagaatcggtgcactcaagggagggagagtgcactgattgcgtgactgcactggaacttggagcttccctgtcatggtggaaagcaaaatggggcagaactcagccagcatgcttggagggaacagttggaccagccctggacagaggccagtagtccatcccagaggtaggaatctgagttctggcaatccttgccactatgggctaaggtgccctggggttcttaataaacttaaaaagcagtgaaggccacagtgactgtaattcctgagcaaggactggtgctgtgctaggcttatagtcagtggacttggggtgcacatgaactagtgagataccagctggggtgtccaaggtagtgcctgcatcatccctcagtccaaccaaggcagcacagctcacagctactggagagattccttccttctgctttaggagacaggaaaggagaataaagaggactctgtcttgcaacttggataccaactcagccacagtagaatagggcatcagggagactcctgcagtccccattccaggccctaactaccagatgtcatttctaaacacgtcctaggccaggagggaacccagtgccttgaagtgaagaacccagtcctgacagtatcgcctgctatctaaagagcccttgaggtctgaataatcagcagtggtagccaggcagtacttgctgcaagccttgggtgagacagagctgtactggcttcaggtgtgagccagcacattcccagctgtggtggctagcggamgaaagaagagggaagagtaaagaggagtttgttttacagctcgggtactagttcagccacagctgggtagagcattaagtgggctgctggggtccccartttcaggctttatttcctggatggcatttctggacctgccctgggccaaataggagcccattgtcctgaagggacaagctcaggaatggcagcattcaccacaagctgactgaagagcccttggaccttgagtgagcatcagcggtagcaatgcagtggtcattgtgggctttgggcaagacgcagtgctgtgctgattttgtatctgacccagtgaagtcctagtggtgatggccacaagggtacttgtaatctgtccttccagctctaggcagctcagcagagagagatactccatttgtttgggagaaagtaagggaaaataacaagagtctctgcctggtaatctagggaattcttctagatcttattcatgatcactaagatggtacctctattagtctgcaagagtgacagcattactgggtttagggtgcaccctaacgcagatatagctgcagtggccaaaaacttaaatcgcaacactcaagtccctttgaatacctggaaagccttcccaagaaggacaggaacaaacaagcccagactgaaaggactataataaatacctaattccttaatgctgagacaccaatgaacatctacaagcattcagacaatccaagaaaatcatctcaccaaacgaacttaataaggcaccaatgacaaatcctggagagatagagacatgtgacctttcagatggataattcaaaataactgtyttgagaaagctcaatgacatagagaaggaattcagagtcctattgataacaaatagattgaaataattaagaagaattgagcaaattctggagctgaaaaatgcaataggtatactgaagaaagcatcaaaatctttcaattacagaattgatcaagtagaagaatcagtgaacttgaatgcaagctacttgaaaacatayggcctgaggaaccaaaagtataaagaacaaaaaagaatgaagtgtgcctacaaggactagaaaatagcctcaaatctaagagttactaaaagggaggtagagagagaaagaaagattgcagtagaaagtttataaaagggataatgacagaaaacttcccaaacctagagaaagatatcaatattcaagtacaagaytgttatagaaaaccaagcagatttaacccaaataagattgtcttaggacatttaggaatctaatttctaaaggtcagggataaagaaaggatactaaaagcagcaagagaaaagaaacaaataacatacaaaaaagctccaatacatttggcagaagacttttcgtggaaaccgtacaggacaggagagagtggcatgacatatttaaagtgctgaagaaaaaagaaaatcaaacatttttattccagaatagtgtatttrgtgaaaatatccttcaaacatgaaggagraataaaaactttcccagacaaacaaaagctgaaggatttcatcaacatcacacctgtccaacgaaaaacgataaagggagttcttcaatctgaaggaaaaggacattgctgagcaataagaaatcatctgaaggtacaaaactcactagcaacattaagtacatggataaacacagaatactgtaatactgtaatggtgatgtgtaaagtactcatatgttgagtatgattaaaagatgaacctattaaagatattattacacaaaacttttcaagacacacacaggataaacttaaagtatagagtttttattagttttctctttgttagtttgtttctttacataaggtgttatttctaagcctcatggtaacctcaaataaaaaaaaatacaacagatacacaaaaattaaaaggtaagaaattaaaacacaccagttgagaaaatcaccttcactcaaaggaagacaggaataaaggaaagaaggaagagaagaccacacaacaaccagaaatcaggtaacaaaatggcaagagtacatccttacttctcaataataacattgaatgcaaatgaactaaactttaaccaaaacacatagagatagtggctgaatggataaaaaacaagacccaatgaattgttgcctacaagaaacataatttacatatcgagacacacatagacagacaataaaggaatgaaaaagatattctctgcatatggaaaccaaaaaagacaaggagtagctatacttatatcagacaaaatagatttcaagacaaaaactataaaaagagataaagaaggttattaaataatgatagaaaggtctatttagcaagagaatgtaacaactataaatatatatgcacccaacactggagcatctcaatatataaagcaaatattattagagctaaagagagagatagagcccaatataataatagctagagactcaaacacccacttgcagcacttggacagattactcagacagaaaatcaatgaataaatatcaggctttatctgcactgtagaccaaatggacccaacaaatatttactgaacatctcatccgacaactgtagaatacatattcttctcctaagcacatggatggttctcaagaatagaccatatgataggtgaaaacataagtctttaaaaattttaaaaattgaaattatatcaggtatttctactgaacacaatggaataaaactagaaatcaataacaggaggaattgtggaagctatacaaacatatggaaattcaaaaatatgctcctgaatgaccaatgattaatgaagaaactaagaagaaaatttaaaaatttattgaaacaaatggtaatggcacataacatatcaaaacctatgggatacagtgaaagtagtcctaacaggaaagtttatacctatatgtgcctacatcaaaaaggtagaaaaacttcaaataagcaatctgttcatatatcttaaagaactagaaaagaaagagcaaaccaaacccaaacttattaggagaaaggaataatcagagcagaaataggtgaaattgaaacaaaaaatagaaaaattaacaaaatgaaaaatttgtttcttgtaaaaattaacaaattcaacaaacgtttaccccaaataactaagaaaaaaagaaaggagatacaaataaataaaatcagagatgaaaaagtagatacaacaactggcaacacaaaaattcaaaggattgatagagggcactgtgagcaattatatgcaataaattggaaagtctagaagaaatggataaattcatagacacatccaacctatcaagattgaactatgaaactttattgtcaggactatattaggtgctgaaccttaatgttatgtatttgttcttattaaaaattgtttcaatgaaaattatattagcagtataaacttctggtctagttgaaagttattccatttgaaaaacgtaatatttgcatagacctgtttgagtatttttattttctagtccccctcccctacactgtacagaattgaagctagaattttctcttttgataaaggaacaaaaaatgaacacgttatttgtaaattgatgtttaataacttaggaaaaacttgaaataccgaaatgtattataagccttaatcctaggtagtcttaaaaaataaatctcttaactatcttttgaatctgtattcacactattttctaagatattttaagttttaatttttgctttttttgaatctgcttcttatttgaaggctacttgtttttactgaggtattattaataaatgactgcattttaaaaataaggtttcttataactatgactggatgtgaatatggaaagcaaaaaagcctgaatagacccatagcaagtagcaagatcaaacctataataaaaagtctcccaaacaaaggaaaacctggaaactaatggctttgctgtttaattctgctaaacatttaaagaactaacaccaatcccagtcaaactgtttcaaaaaatagaggatgaatgaatgctatgaggccagtactatcctgatatccaaaccaggtttgtttgttttcaaaacaaacaaacaaacaaacagaaaacccctatactacaatattcctaatgaattgataaaaaatcctcaatgaaatactagcaaacagaattcaacaacacatttaaaaagatcgttcatcacgactaagtgggatttaatttagtaatgtgaggattgcccgacatatgaatatcaattaatgtgatacatcatatcaacagaataaaggacacaaaccatataatcattttaattgatgatgaaaaagcatttgataaaattaaatatcccttcatgataaccaycccctaaaataaaatatggctatagaaggaacacctcaacacaacaaaagtcatatacaacagacttacagctagtatcatactgaatagggaaaaactaaaaccctttcctctgagatctgggacatgacaagatgcccactatcaccactcttattcaacatagtattggaagtcttagctagagcaatcagaaaagaaagattaataaagggcatctacattggaaaggaagaagtcaaattatccttgtttgcagataatataatcttatattggggaaaacctaaagactccatgaaaaaactattagaactaaaaaacaaattcagcaaagttgcaggatgtaaaatcaacatacaacaatcagtagcatttctatatttcaaaagtgaacaatctaaaaaagaaatcaagaaagtgattccatttaccatggctaaaaacaaaattaaaaacctagaaataagtttaactaaggaagtgaaatatctctaaactaaaaacaataaaacattgatgcaagaaactgaagaggacacagaaaatggaaagatatttcatgtaaatggattagaagaatcaatatttttaaaatttccatactaaccaaagcaatctacagattcaatgcaatccctatcaaaataccaatgacgtttttcacagaaatagaagaaacaatactgaaatgtatatgggaccccaacaatctcagaatatgcaaagctctctgtagcaaaattaataaaactggacgaatcacactacctgatttcaaattacactacagacttacaataattaaaagagcatggtaatggcataaaaacagacacatagactagtggaacataatacagaactcagaaataaatccatacagctacagtaagctttttttttttttttttctgtcacccaggctggggctgtggcctgatcttagctcactgcaacctccacctcccgggctcaagcaattctcccacctcagtctctctagtaactgggaaaacaggtgcctgcaaacatacctggctaatttttttttttttttttttggtagagacgggtttcaccacgtgggccagctgatccacctgcctcagcctccggaagtgctgagatcacagatgtgagccactgcgccagacctggtaaactcatttttgacaaaagtggcaagaatataaactagagaaaagacagtctcttcaataaatggtgctgggaaaactggatatccatatgcagaagaatgaaattagatctgtatctcttgccatttataaaaatcaagtcaaaatgaattaaagacttacatccaagacctgaaactatgaaactactgaaagaaaacactggagaaactctccaggccattagattgagcaaagattttaataataactgcattaataataatgcagccaaagcaaaaatggaaaaatgggatcacgtcaagttaaaaagtttctgcacagcaaaggaaacaaccaatgaactgaagagacaacacacagaatgggagaaaatatttgcaaactagccatctgaygatgatcaataatcaaaatatataagctcaaactactcaataggaaaaaaatctaatccaatttaaaaaatagacaagagatctgaaatgatatttttcaaaagaagtcatgcaaatggcaaacaggtatatgaaaagctcaacatcattaatcatcagataaatgcaaatcaaaactacaatgagatatcatcttaccccagttaaaacggcttttatccaaaagacaggcagtaacaaatgccactggggatgtggagaaaagggaactcttttcaacttgtacactgttggtaggagtataaatcagtacagccactatggagaacagttcagaagctgcacaaaggactaaaaatagagctaccatatgatccaggaatcccactgctaggtttatacacaaaagaaaggaaatcagtatattgaagacatatctgcattcccacgtttactgcaacactattcagaataaccaagatttggaagcaacctaagtgtccgtcaacagatgaatggttaaaagaaaatgtgctatattcacacaatggaatgccattcagagattaaaaaaaaaaaaaaaagaggaatgagatcctgtcatttgcaacaacacggatggacctggaggtaactatgttaagtggagtaagccagccacagaaagagaaacttcacatcttcttatgtatgggagctaaaaaattaaaacaattgaactcatggagatagagagtagaatgatggttaccagaggctgggaggggtagtgaggggtgggtgggtgataaacaggtacaaaaatatcattagagtgaacaagatctagtatttgatggcacaacaggatgactacagtcaaaaataatttattgtatattttaaaattgagagacaggactagctggatttcctagcctaagaattcctaaacctagctggggaaggcgaccacatccaactttaagcacgggacttgtaattcagctcaccctcgaccaatcaagtagtaaagagacctcactaaaataccaattaggctaaaagcaggaggtaaagaaatagtcaatcatctatcgcctgaaagcacaggggtagggacaatgattgggaaataaaccccctcagcattggagccggcaggggcaaccccctttgggtcccctcctgttgtatgggagttctgttttcactctgttaaatcttgcaactgcacactcttttggtccgtgtttgttctggctcgagctgagctttcgctcgccatccaccactgctgattgtcactgtygcagacccaccactaacttccactcctccagatccagcagggtgtccactgcacttctgatccagtgagacgcccactgctgctcccratcagggtagaagctcgccattgttcctgcgggctgaatgcccgggttcatgctaactgagatgaacactagtggttgggttccacggttctcttccatgacccatggcttctaatagagctataacactcaccacatggcccaagattccattccttggaatccaggaggccaagaaccccaggtcaaagaacaaaagtcttcccgccatcttggaagcagcctgccaccatcttgggagctctaagaacaaagacccgccagtaacaaaataactaaaagagtataattgaattgattgtaacacaaaggaaggataaatacttgagttgacggatacccccatttatgctgttgtaatcattgtgcaatgtatacatctactgtgtgctctcaaaaataaaaaaataaattaagaaaacaagagaggttagaaagcagtcagatgatatattcaaaaagttgtaagataaaaatagctatcaaccagcaattcgacatccagcacagcaatctttcaaaaactgaaggtaaaataaagacactttcgataaacaaagactgggagaattgctgctagcaagctggctctacaagaaattccaaactaagtcctcagatgaaaagtaaatgactccatatgataactgcaatccatggcaataaataaacagtgctgctctaagttcttatgtagataaatatgaaagacagtctaataattatcttttcttctaaattgatttaaaagaaagctgcataaaacaataactataaaactattgttgggtttataacatgtaaaggtataacatacacatttttttttgtttcttctggaaaaaaaaaaaagggttacatgtgcagaacgtgcaggtttgttacacaggtatacatgtgccatggtggtttgctgcacctattgacccatcctctaagttccctcccctcagtccccaacccccaacaggccctggcatgtgttgctcccctctctgtgtgcatgtattctcaatgttcacctcccacttatgagtgagaacatgcagtgtttggttttctgttcctgtgttagtctgctgaggataatggcttccagtttcacccatgtcactgcaaaagatatggcctcattgctttttatggctgcatggtattccatggtgtatatgtaccacattttctttatccagtctatcattgatgcatatttgtgttgcttccatgactttgctattgtaaatagtgctgcaataagcatacgtgtgcatgtgtctttatagtagaatgatttctgttcctttgggtatatacccagtaatgggatcgcttgttcagatggtatttctggttctagatcctcaaggaatcgccatactgtcttccacaatggttgaactaatttacattcccatcaacagtgtaaaagtgttcctatttttccatagccttgccagcatctattgtttcctttcaataatcaccattctgactggtgtgagatggtatctccttgtggttttgatttgcctttctctgttgatcagtgatgttgagctttttttcatgttagttggctgtgtaaatgtcttcttttgagaagtgtttgttcatctcctttgcccactttttgatgttttttttcttgtaaattaacatacaatttttatgaagatatacatttcctttctcttaagaagatacttgtaagtggaattctgggtaatatggtaaatttatgtttttacttttttgcttcatttatattgaggctctgtttttaggtatgtgttcatacctaaacacaaaggtatgaacttgatatgtgttcatacttgatacattccttgtaatcatattatctctaataatatttttccttaaagtctatttttgtgattagttcaattagtatataaacatcttgcatatgtttactgtttcaaggcttatcattttccattcttttactttcagcctattagtgtctattaatcaaaattatttctcttatagattgcatatattttgatattttttttaaaaatccagccagctgggtgcggtggctcatgcctgtaatctcagcactttgggaggctgaggtgggtggatcatgaggtcaggagatcgagaccatcctggctaacactgtgaaaccccgtcactactaaaaatacaaaaaattagccgggcgtggtagcggatgcctgtagtcccagctactgggaggctgaggcagaagaatggcattaacccaggaggtggagcttgcagtgatctgagatcgtgtcactgcactccagcctgggtgagagagcgagactccatctcaaaaaaaaaaaaaaaaaatccatactgacaatctctgcctttttattggagcatttaatctgttaatgataatcatagtgaaaagaaagaagaagatagagctatgttggagagaagtttctatgttttactatattttgtatattttattgaaatttatttttagtaattttagatggtactaaaagaacagagggatagatcacataaatatacagaaatcaaatagcaaaatgggagacgtatatctaaacatttcaataagcatgttaaatgtaaacagactaagtggtccaataaaaggatagagattgtcagtatgaattaaaaaacaggatcaaaatacttgttgtctataagagaagtaatttagattcatagacacaaacaggctgaaagtaaaaggatggagaatgataagcctttggaataataaccatatgcaagttacagttattctgctaatatcacaaaaacaggctataaggaaaaaatattactgaagataaaataaccagaggaaacatataacaagtatgaacaatgtatatctaaaaacagagcttttatatacatataaagcaaacaagtaaaaaccataaatttaccatatgacccagcaattccacttacaagtatctacccaagagaaaggaaatatatatccccatgaatataaatccccatttgaatatttatattcaaatgttcataacagcattttaaattatagcccaaagtggaaagaatccaatgtccatgaaatggtgaactgataaacacatgtggtatatacatagaatgaaatactattcagcagtaaaaagaaactgactacggacacaagctactacatgggtggatctcaaatacattttgctaattaaaagaagagtcaaaagttaacatgttgtatgaatacattgacatgaactgttcaaaaagcagagccaacattatactgaatggggaatagttgaaagaactggaataagacaaggatgcccacttttactactttttttttttttttttttttttgagacagcatcttgctctgttgcccagcctggagtgcagtggcacgatctcggctcactgcaagctctgcctcccaggttcatgccattctcctacctcagcctcccaagtagctgggactacgggcgcccaacactacaccccgctaattttttgttatttttagtacagacagggtttcaccatgttagccaggatggtctcaatctcgtgacctcatgatccacccacctcagcctcccaaagtgctgggattacaggcatgagccaccgcacccggcccacttttactactcttattcaacgtagtactggtagtactagccagaggaatcaagaaacagaaagaaataaaaggcatccaaattggaaaggaggaagtcaaattaccactgtttgctgatgacaaaatcttacatctagaaaaacctaaagactccatgaaaaatctcttagattgataaatggacttactaaagtttcaggataaaaaatcaacatataaaaatcagtagcatttctatacaccagtaataatctagctgagactattcacagtagcaaagacatggaatcaacccaaatgcccaggaaggatagactggataaagaaaatgtggtacacatacaccatggaatactatgcagccataaaaaggaatgagatcatgtcctttgtagggacatggatgaaggtggaagccgtaatcctcagcaaactaacacaggaacagaaaaccaaacacctcatgttctcacttacaagtgggagctgaacaataagaacacatggaaacaggaaggggagcaacacacactggggcctgttgtggggtgaggtgaggggaggaagaacattaggaaaaatggctaatgcatgctgggcttaatccctaggagatgggttgataggtgtagcaaaccaccatggcacacatttacctatgtaacaaacttgcacatcctgcatatgtacaccagaacttaaaataaaaattttaaaaataagctagctgataataaaatcaagaagacaatttcatttacaataggaacaacaataacaaaaaaatacctaggactaagtttaaccaaagagttattataaaaaatctccaaaagggaaactacaaaacactgatgaaagaaattgcagatgatacaaatgaatggaaaagcatcccatgattgtagatcagaagtattaatatttttaaaatgaccatactgcctcaagcaatctacacatttaatgcaatccatatcaaaataccgacatgaattttcacgaaatctgagaaaagatcctaaaattcatatggaaccaaaaaagagtccaaatagccaaagcaaacctgagcaaaaagaaaaaagcaggagggatcacattccctgacttcaaactatactatacagctatagtaaccataacagcatggtactagtataaaaatagatgcacaggtcaatagaagagaatatagaacacagaaatgaagccacatttttataggcaactgatctttgacaaagtcaacaagaacatccgttgggaaaagggtacccttttcaatcaatggtgctaggaaaattagattgccatatgcagaagaatgaaacttgacctgtatctctcaccatatacaaaaatcaactcaagatggattaagggttttaatgtaacacccaaaattgcaaaaatactagaagaaaacctaaagaaaactcttctgaacattgatctagacatagaatttatgaccaaaacctccaaatcacaggtaacacaaacaaaaatagataaatgggacttaattaaactcaaaagcttccacccagtgaaagaactaatcaacaaaatgaacagacagtctgcagaatgggagaaaatattttcaaattattcatctgacagggactaatatctagaatgtgcaaagaactcaacagtaacaacaaaaaaacctcacaaataatccccttacaaagtagaaaaagggcatgaatagacattttttcaaaagaagacatataaccggccaacagatatatgaaaaaatgctcaacatcactaatcatcagagaaatataaatcaaaaccacaattagatatcatcttacccttgtcagagtggctattattaaaaagacaaaaaataacagatgttggcatggatgtagagaaaagggaactcatacactcttgatgggaatgtaaattagaacaccctctatggaaaatagtatggaaatttctcaaagaactaagactagaactaccaattgatccaataatcccactactggatatctacccaaaggaaattaatatatcaaaaagatagcagcacttgtatatttgttgcagcaatattcacaatagcaaagatatagaatcaactgaagtgtctaacactggatgactgaataaagaaaatggggtatgtatcacaatgttataccatttagctatgaaaaaaagtgaaatcatgttttttacagcaacatgaatggaactggatgtcattattttaagtgaaaagagccagacacagaaagtcaaatatcccatgttctcactcataagtgggtactaaaaatgtgtacacatggacatagtgagtggaatgatagacaatggagacttggaaggtaggatggatggagcagagtggatgatgagaaattacttaataggtacaatgtatgttattctagtaatggatattctaatagtcctgacatgaccagtagacaatctatgcatgtaatatagttgtacttctaccccataactgaaacaaacaaaaaaagacaaatgtaaacatactttctttccaaaaatacacaaagaaaataaataataaagagtgatggttgcctgtggttggagtcggaaattgtattaattttaaatgggaagtaaaggaccttgttggattgatggcaatttaggaaactcaattgtagtgatgataaaggttatgaaattccacatttacaaaaaagtcattgaattgtaagcttaaaatgggtgaattttatcgtatgtaaattacgcttcaattaagtcattaagaataaagcccaattattatacctctgattgtcagtgtaaagtcttggatgtctgtgcaattctaatattcagtaatttaaaaaaatgctacatgtggcagcaactgaatagattgttttcttgtacacaaagataaaccatatttcccagttttatagttcttgtgtgatcagttctggccaaagaaatctagatagaactagatacagcattttctggcttggtcttttacactgatttctctcaacctcatccatgggggtgaaagcaaataactttgagatattggagacacacaatgggaaaagcacaaatctgagtgtgcccacctgcatcaagatatacacataaacaagaaattgttatgatgttaaggcattgatagttgcagattactgttaccacagctcagcctagcttgtcctaatgtgttacatttggtattctataagacatctgtgttatccaaatccctactctgatcactattcattgtttatattcttttctcaagataatttttcataaccatgtttatttgtttatttggtattctttgcacacatcagcatttttgcattgattcacttttatattgaagtatgccagagttgatgagatatcattcttcattttctaatcagagtcatgcctaaggaagtgatttttgttgattgtatttattttcagcaaatatgaattgtgatacctatgtgtgattttgaactgcaatagaaattacctttaaaaattaattttaaaaatgatgacacaactggaagcagaagattatgggtaggaagacaagttattatgtgtttgtgagagaagtcacctaaaatgaagccaaccaagaggagaacctagatagcaaggttcagagaagggattccaagtacatagaggcagcatgatttaatgagaatgtgggagaggtaatatggagaaatgggaaagaaaatatgaaggggtactcatgatcagtacgtctggcatagggagcagagagagtatcagaccagagacttctggagcagagccatatataacctgtctacttcacggcctgtgggaatagggtgaatttgaacaatgaggggtttgtgagttaattcaatgttccaagtaactgaatcttctttcactatattaatcctcctagwtatatgtatatatttttattttgtgagttaacgaagattagatccttttgaatgatcctttcctggtaataactgaagcctgagtcttctctgggaacactgcttctctcactttctacctactttagaggcaggaagaaatttggcaacaatcttgctctccattgattttctaaatgaatactcctctamctatgcataacatgtgtcatttaatgctctgctatcagattacatagtttacttttttcagtgctattgtcttcttccaatttcctgatctttttcctataaacttagacttggcccttatgaaacaacttctccatcattattcacatcctgatcttgagttatttcaatattcttattgattcaattagcacagtagcctctcctccttaaattttcatctctaaaatcatcacttctggtagtgttttgaagaaagattgacggtcaagaccaacagatctaggttttatattaatggaagggatccagacacaaaaagtacatactctatcattccatttaaatagaacaccaaaacatacaaaactcgtctttgagattagaagtcagaaaagtgaatggggtgttagcgggtatttgggggcactgcaatattatctttcttaacctgggtgcttgttatatgagtgtgttaatttgctgaaaagtaatcaagcaaaaaacctattgtatgtacactttaatatatgcattgtatacttcaataaaatatttctaaaataaaaaagatctagatttaaattttggctctacctagtatttgttttggaattataagcaagttaattaagcagtctgatcctcagtttcttattccgtaaaatagtccccaaacccattctggtgaacattccattttatgggaaaattaaaaacacagaataaatggttgtattaccactacgaatactaggaaatctgtcaatgatcattattataacaattattgatttaaaataacctacttcatcaaaacaacctctgtgaccagaacatgaactgtgtcttattttcaaatatttaagctttgaaattttaagcctctaatatttcatatgacaataaacttttcttcaactctttcactttgatgctcccagtgctcctgtgagtacaggctttacagccaggctttatgagctcaaatccaggcttcactcctgcatttgttttttttgttatgtggcctagattctaggattcatttttcatttttaaatctcttgttacttgtccccagccacatctattctaaaacatggtagaaatcctattttatttaactatgtatctctggaaccgagcactctatagatagtcacagagaaatatgaattcttagaaggtattggaaggatttttttttcatcagaatctaaaaagggaaaggtgtcagtttaaggtactataattgttccatataaaatcttacaaataaggggaggacctgggaaagggaaggccgccaaattcaaattacgtaatattttacaaatcaagaagggtcattttcattactaacaaaaaaaaaaaaaaaaaaaaggacaccactgctccatttgaatggcatcaacaaagtagggtaggtttagaaatcaggaacggagttgctacactggctggaaactgtcacagttatgatggaatgtgtatttttgtactttggtgaaacaaaagagaattctctgattgatgagttgcaggaagtagaggttggatgtcctaagccagacaacgtaatagcaacataaaacttgagcttgcttctatttatctctctttggacaggtgtccctggtcttttgtaagttgatcatctctagaaaaaaaagtaaggaaacaaataacatccttgagatattataaacttcttatggacaaaatacgattttacttgattccttatatgttccaacgaaagcaatagaaagtgcttgattaatatatgttgatgtcattttgtcagcggaatgcagagcaaagtgggaaattagaataagcatgtggctcagtctctcatcaccatggcttttagtcctggtaggataattagaatgtagaagcatttgttgagaacctaaggagtctaagttacactaacaactttctaaatgaccttaaactgtgagcataatgatcttatatatgcattttgctgtagcatgtggtttatttcttcttaaaagccatgataaaatatttatgacttttaatatttatatattagtccacaggttgaaaaatgagaccagaagccacctgcaagactgatatttttccattattagaattcttagttctgatcaatatgtatccctctatgttatctcagtatccatttgccttattttgtttatttaacatcatctatagttttaaaagacattttgggatggtttatcattaatttatcatttagcatcataaaatgtttatttccttttagaaaatataaatcattttctctaagaacatcaagtgtgtgattataaagtatatggtacaaaaaggagagcttattttatgagtggaatgaaatcagcactttaacttaatttctgtcataagattccatatgtgtatgtgttctccatgtaagcttaataatattgagggaaacagactatttatgtgttattttgaaaatcttgtgaacgtaatttgtgtttcatatcatataaagacaaaatggccatagctagctgtgaatagatgagtcaaattgcaatcatcaaaccaaaaaaagaaatttcaccaacttccatctttcttctcactcctctgtgccaggtctccaggatctccagtgagttcaagaagaacaggacatttccaaggccttgcaaagggggttgctgtcattggatttctaagaaaattggcccaattatatgtctgggcacttccctagactgcagaagtcagtagaaaaggaggaggggaacaaaggaaagatcaagagaaacaggcaaagaaggccttattgctttgtggtcataaagagagagacatgttagttggcttcacgcttctcattgggtaaagtggttgtgcaatttggcttgatatctactcagctaacaaaaatatatctattgtgttctaagactgcaaagcactctttgtgaaatatatgatactataataagctgtactattttgctggcaataagcttcaaaacaatttacaagcatttctttcttcgttcagaaccacctagtagtgatggagggaaaattacgtaattcctcaagaaccgtatttcaaatcaaaaggacttatttagacaatgtcaacttctgttttgtttatttcttttttaaagcagcctactatatgaaaaaaatcaaagctttggcaatgtttctttgataactgatctatcataaaatggataaaaataaaagaaacagccatttgcaactgactgcaatcatgatacagctgttttctttttacaagtaaataaatcaatgaacacatagtagttaaggctattgtggagcacagttctaagtgactctcctacagacaagttcagcaatttttcaacatatttccatggtccattcttagctaaaaatctccacttttttgctcctgcaagcagtcattcaactaatgagttttatgaagacctgtcgttcatttggcctatactaaagaagtaatttaacaytgcataaacaaaaagaggctttaacaaacactataggaaaagaaaattcatccacccataaattcagtcctttactccttactaaatgaaatcttcagatgatataatttcttttccaatatagaggctgttatttacttttgcgtttaaaggctagacattttctgcttctactatctttgaacattgctataatgttaaatatttgaggagttgcctccgaacttgctgatgataggaaatacttcaaagggagtctgtttccttctataaaggaaaataaatcttagtttatgcattatatttcaccctgcttgctccacaatagacagaacctgatatcaagtaaaaacatttggtatgcatattttttgtaaatactaagatctttgagttgtattttgcatgcaaagttactgattcatccatccaaattcactcacacatttgtaacagacatacataatgtaaacaagctaaattcagaaactgaagcagaacctatggtattatctaagacacatgtagaaatgtgtctagcccaaatttgggactggtaattataaacaaattcctcataatcacaaaatatcctgtgtacaaaggtaacacatatcaacatgctacaagggaattttgccctgcaaaaatataacttatagaaatatgggatttgtggttgaagaaattgttttgaatcttgggagaaaaaaaaggtttagctgttataaggtccaaatgtttcatacaaaaaaataacttcttccagcattttggacaagccattccaagatgtgatcaagtaatttaaaaaataactttataagcaagccaggaagtagaaatgaaagcagtagcaataaactgctaaaatctgagaaatgttaaggatccttataaggtctaaaagataagaatgcataatgaatacaaaattatctgttgatagagaagatgatgtatgtagtgactgtatgagtcttctgagtttacgaaagtagaagctaatctaagacacttcaattatacttacccatctgtaattgtacttagtaatatttgtaattattgtctttatgtctgatgagtttcagtagtcataaaatgttttataagttgataaatataatcttcacataaaagatgagaaatttagtgagggatttaatataagggctatagtcaaagtaagctagattaaggcatgaaaaagtagtataatatggtatgatatctgtcatatgcataatgaaaagtttctctgggcataaagtgatactatatcctggagaatggtatttatattagaaacacaaatattctgcctgatcgacttctaggcaggtaatttttaactagcgttatactcatcctgataaagttgttctaatagagccacattttagagacttagtgtttttcactgtaatcccatggttctgttgccatggcttttcctttgactcttgtttccactcttacagaacataatcgtaattactattttatattgatcagtttctatgtactaaaatttttgcttaattttactaaagatatcgtggcctaggtaggattataatcatttcacagatgagaaaacaaggtctaaaatgtaagcaatttgctcaagatcacaaaactagcatttgagagtcaaggcttgagtctaggtgtctgacaccaaagccacagggactcccatttacaagtactaagaaacagcatacacatatgttggaaaataactgaagtgttttttttttgtttgtttttgagacggagtctcactctgtggcccaggctggagtgcagtggcgtgatcttggctcactgcaagcttcaccacccgggttcacgccattcttctgcctcagcctcccaagtagctgggactacgggcgcctgccaccacgcccggctaattttttgtatttttcagtagagacggggtttcaccatgttagcctgcatggtcttgatctcctgaactcgtgatccacctacctcggcctcccaaagtgctgggataacaggcatgagccactgtgcctggccgaactgaagtatttttctgcatcctataaacaaatcatgattgaaatctaagcaatgaaacttttttgttttttatgcccctgttacttttattgtatcaataaaagattttgcttagaactgaattggataaatggcattttgctgcaaaagaaagaccaacttttcagttccaaagaatttcacatactccatgctggtatcagaaggctttctttatggaaaagaactatggggaagccacagagaaacaaaaatctcgtatttggagcccgctggaggcttcaggaatatgaaacaatgacttcaagtataagataattcctcccattgttcagttggatttattggattcatgttcatatgtctaattgtatgagcaccaattcctcacaaataagaatctgcacggacatacaaaaactgtatctatggcagaaatattatcacatgctcatcctagcactgagcacagacagaggcttttagtaaaggaaaacttttatcatactgtactacatccgtataagagctatgcaaccccaatagaaagggattccagtttggatttaataacaacatcttaattttgctttgcaacttgtaattaacaaaatgttcttatatttattatctcacttggatttttataggaggtatcttttgtattttattaaaaaaaaattacagcatgccttagtgttgtttcaagctttgccaggattttttctgtagtggcagaactcatgagttttagaaatgagaaatttaatcacgttttttttttttaatttgaccccagagttgtttttaatttatacagtaagttctcacttaattgatagattcttggaaatagtgactttaagtgaaatgaagtataacaaaaccaattttaccawtggctaattgatactaaaacaagagttaaattcccacaacatattcctggtcacaaagcatcaccagactcctaaataatgacccaaaacatttctaatatgaaacattgaaatatatgtgagccatacataaagaatgattaacaaaaacaagtaaggtaattgtttacctgcctattctagttcagggttatgggtggccagatcctatcctagcagctccttgtataaggtgggaaccagccctggctaggacaccattccatctcagggtgtattcacaaatacccacagtcactcacactgggattattagatatgccaagtcacctgatgtccatacctttgagatacttccttctctgggtggaaaccagggtacatgaaaaaaacccatgcagacatggggataccatgtaaagtccacacagacagtagtcccagccaggaatcttttcctttttctcatcaatgttacaacaaaatgatgttgaatgacttgaatgacattattcaaggtcttgctgtaattctaaatcattttagtggtggcaggattcttactgagattcctctgatagttgttttttcagtagtataagttaatattcatttattcttagattgaattgtttaataaaatgtgttgagattcttatacgccagacactgtgttaagcagagtaggtataacagaggaacatgtgaacaatttagggagaaattaatgaatcagtaggagataaaaaagtttctgtagaggaaactacgctttgtagctgatgcgaataaatgattagaagtaaaaaaataataatttatatgagtctatttagcacttagaacctgaatcttgtgaaaaaaatatttcttattatttcctaaaggaaaatgaaggcttttcctcacaaaaccaagaaggacgtctacawgctaaagcagaatggttctgcttgaaagggtgggaaatatcttgcctacttgcccttttccgtttttccagaatttctcctgtgccatctgttaagagctctagggaagatctctactggctaccaaccctggataccatatatgatatgtttctatatcctgccttaatttccttaatggtgaagatttatgtcagtcagtgttcaacacaatttagtagctatgagagcaggagaataactggtccaagttttgactcttcttgaacttgctgcaatttttccattcgatcaatataaggaaatcatgattaatgcgtaatgtttcatttaatatacataagtgggaaaaatgttgacctctgatgactggttacaaatgactcgaagaaaacaaaaatcaataaagaaattagctaaatcgataaagaaattagctaaccttgagttaactcccaatattttacttatttgctttactctcaatctttttgttcttggcatatttacttatgacctaaatagccaagatctttttttttttttttttattttttgagacggagtctcgctgctctgtcacccaggctggagtacagtggtgtggtctcggctcactgcaagctacacctctcaggttcatgccattctcctgcctcagcctcccgagtagctgggactgcaggcacccaccaccacgcctggctaatttttagtatttttagtagagatggggtttcactgtgttagccaggatggtcttgatctcctgaccttgtgatctgcctgccttggctcccaaagtgcggggattacaggcatgagccaccatgcccggccagtaaccaagatcttttctacatgcatttatctctccaacttagcctctcaatcacaattcctgcctgtaggcattcgatgaatataaatcctacccaactcagagtcctcaatagcacatttcttaggtattactctttttctgtctttcctccctctcatttattgagcaaatatcttatcctaaacaaagggctaaacatttaatattcattgtcacatgcaatatgttcaatatctctttgaagtaggtcagatcagacaaagatgaagatcagatgaagcttttagacttttgtgtggcctaatattaggcctaatagttaatccatcgcagaaccagaattaaagctaaatctacttgaatctaaagttatatgagagacaattaattgctccccaatatccgaccttcctttctctatgataatgaaagtttcatataagcaactgtatgaactgctttctttgctccaagaagaggccacatgactaggttccacttgatggacatggtggtacaacttctgggccaagagcatattgagaaagaaagtgctttcccttattgctttctcctttgccactagctggaatacagtcatcacggagggagccatcaaaggccacttggaccttgagatcaaagctgagtgttcaggatggcagaagggtaagtcaggagataagccaggttctcagctctatcaggttgccatataagtgatggactccctatccagagtgaacacagcatttctggttcgcttacagcaacataacatttatcctaacaaagcataccatgctctaggactcaattagaaagtaagaagaggcaatatgaaacagaaagcatgtagtagtcatctttaagggggtcactgaaatagtttgagattgtttgataattgtatgtagtgagaagaaagggagggagaaaaggaacccaagttggggaacattcatgattaccaataataatggccttcacagcagtattgacaattccactctgggtgagtgagtgaggatttaaaaagcaatatgaaatgtccaaaagaattttcattcaaggaatgatggtaatgtataacatgtaatgagactaagagcaatctgcctagaaaaaaagaaacaatgagaatagtccagaatgcaggaatgaaatgaattaggtaggaaaaatctgagaaaatatcctatacagcccattttctcagagcctgttacgtcgtctctgggtctgttgcaaataccttttatttgtcaactgtttagatgaaatcaattttaatgaatgtgttccttattttctcaccgactaataatttggttaatgatttcctttttatatgaatattaacagttgccttgtttttaatgctttaacatttttcaaagaagctaactcttcagcattcggcattttattgacttcggaatgcaactctcttcacttaaattatattttggggagatttattatcattttgaaatattgagcaggaaattttaaaagtaggacaactatatttggtatccaatacaactagtaacgatcaactgaattaatgtgttttctagttaatgtgctttctagacttatagcagatctgatctaacaccattaaattcactcaagaatcaaaaacatggttgacatctaagccatagaatttttttaaatggtgggaagtaaatccagtaaagacagaaaaatgattgacttgttataattaaccatcgatcatactggaggggtatgagtaaattgggcattcccttagatgaagggttttcctccttattaggaattcagacaatgaaatattatttctctgaggtttttgctaagattgcttatgctgttttcttctcagattaaatatcatatgaaacacagtaattcaattatttggactctacaataattttaaagggatgatgttatttgaaatactataataatctggggaggggaaaagcatcaaatgcatcagttatttaactgaaattacagagtcaaactctgtaaaacatttgaagagatttattctgagccaaatatgagtgaccatggcctgcaacacagccctccggaggtacccatgtgcccaagatatttggggagaagcttggttttatacgttttaggaaggcatgagacatcaatcaaatacatttgagaaatacattggtttggtccagaaaggtgggacaattcaaagtggggcagcggaggtgagatggggaggtgtttccaggctataggtaaatttcaacattttctgatttacagttggttcaattgattgagtctgtctgaagacctgggattaatagaaaggaaaagttcaggttaagataaaagaatgtggaggtcaagttctttggaagtctcataatggctgcccttagagacaatagatgacacgtttcctattcagacctttaaaatgtgctagactctcagttaatctcttcaggattgagagggcctagaagaaaaagatctcactatgtaaataaagattctttacagatgcaaattcttccctacaaaagacagctttgcagggccatttcaaaatatggcaaagaaacacgttgtggagtaaaatattttgattttctttttgtcatgtaatgttatgycagagttaggttagaaagtaagtcatgatatatagggttaaataaaacccatctaatgagaatttatggtttgcagggcatgactctccagacccctaagataggaatttgggcaagataaaaaaaaaaaaaaaagaaaaaaaaaacgttgcttagtcctcagtttccttgttttcttttgccctcaagttttggaagtaatcaattccaatgaaaattctttgaaaacttcccaactcatcaaaaataacaagctgtctttataaaacatagatgctgaggacagtttgactatgggggaaagatccttcaggtatggggtcaagagaccatattttgtagggtggcaaattacattttccaaaaatgaattcatcaatatatattccattccacattttcttcttccaatgtgaccaaaatgctcctctgttgagagacagaatctatgattccctacttgaaacacagtaggaaagacttttgtaacttcttcagtcaatagcatgcagtagaaatgatgctgcatgactttcaggtcccagtcttaaaaggcaacamaactcccacctggctttctctctctcagacacatgccaccatgttgcaaagaagctcaggctggatggagaggccacatgtgggtattctggctgatagcaccaggtaggcctggaacctagagtcaatactaactatcagacatgcagtgaattcaaaaaattagattccaatgccaagactttaagtcttttagctgatgaggaggcaaaatttcctccccaacctctcaactgacccaaagaaattatgagtgaaaattggcagttccaagatggccaaataggaacagctccagtctacagctcccagcatgagcgacacagaagatgggtgatttctgcatttccaactgaggtactgggttcatctcactggggcttgtcagacagtggatgcagtkcaycgaacatgagctgaagcagggtgaggcattgcctcacccgggaagygcaaggggtcagggaattccctttcacagccaagcaaagctgtgacagacggcagctggaaaatcgggtcactcccaacctaatactgtgattttccaatggtcttagcaaatggcacagcaggagattatatcctgcacctggctcggatggccctatgcccacggagccttgctcattgccaggacagcagtctgagattgaactgcaaggtggcagcgaggctgggggcagggcacccaccaatgctgaggcttgggtaggtaaacaaagtggccaggaagctcgaactgggtggaycccaccgcagctcaaggaggcctgccagcctctgtagactccacctctgggggcagascatagccaaacaaaaggcagcagaaacctctgcagacttaaatgtccctgtctgacagctttgaagagagtagtggttctcccagccccctttgagatctgagaacggacagactgcctcctcaagtgggtccctgaaccccgagtagcctatcttggaggcaccccccagtaggggcagactgacacctcacacggccgggtacccctctgaacgaaacatgcagaggaacgatcagatagcaacatttgctgttcagcaatatctgctgttctgcagcctccgctgctgatacccaggcaaacagggtctggagtggacctccagcaaactccaacagacctgccactgagggtcctgactgttaaaaggaaaactaacaaacagaaaggacatccacagcaaaaccccatctgtacgtcactatcatcaaagatgaaaggtagataaaaccacaaagacggggaaaaaacaacagaaaaactgaaaattctaaaaatcagagtgcctctcctcctccaaaggaacgtagccccttgccagcagtggaacaaagctggacggagaataactttgacacgttgagagaagaaggcttcaaatgatcaaacttctcccagctaaaggaggaagttcgaacccattgcaaagaagttaaaacctcgaaaaaagattagacgaatggctaactagaataaccaatgaagagaagtccttaaaggacatgatggagctgaaaaccttggcatgagaactacaggacaaatgcataagaaccagtagctgatttgatcaactggaagaaagggtatcagtgatggaagatcaaatgaatgaaatgaaatgagaagagaagcttagagaaaaaagaataaaaaatgaacaaagcctcgaagaaatatgggactatgtgaaaagaccaaatctatgtctgattggtgtacctgaaagtgacgggragaatggaaccaagttggaaaacactctgcaggatattatacaggggaacttccccaatctagcaaggcaggccaacattcaaattcaggaaatacacagaatgccacagagatactcctcgagaagagtaactccaagacacataattgtcagattcaccaaagttgaaatgaaggaaaaaaatgttaaggacagccagagagaaaggtcaggttactcacaaagggaagcccatcagactaacagtggatctcttagcagaaactctacaagccagaagagagtgggggtcaatattcaacattcttaaagaaaagaatgttcaacccagaatttcatatccagccaaactaagcatcataagtgaaggagaaataaaatcctttgcagacaagcaaatgctgagagattttgtcaccaccaggcctgccctacaagagctcctgaaggaaacactaaacatggaaaggaacaaccggtccaagccactgcaaaaacatgccaaactgtaaagaccattgaggctaggaagaaactgcatcaactaatgarcaaaataaccagctaacatcataatgacaggatcaaattcacacataacaatattaaccttaaatgtaaataggctaaatgctccaattaaaagacacatattggcaaattggataaggagtcaagactcatcagtgtgctgtattcaggaaacccatctcacatgcagagacacacacaggttcaaaataaagggatggaggaagatctaccaagcaaatggaaaacaaaaaaaggcaggggttgcaatcctagtctctgataaaacacactttaaaccaacaaatatcaaaagagacaaagaaggccattacataatggtaaagggatcaattcaacaagaagagctaactgtcctaaatgtatatgcacccaatataggagcacccagattcataaagcaagtccttagagacctatgaagagacttagactccctcacaataataatgggagactttaacaccccactgtcaacattagacagatcaacgagacagaaagttaacaaggatatccaggaattgaactcagctctgcactaagcagacctaatagacatcaacagaactctccaccccaaatcaacagaatgtacactctgctcagcaccataccacacctattccaaaactgaccacatagttggaagtaaagcactcctcagcaaatgtaaaagaacagaaattataacaaactgtctctcagaccacagtgcaatcaaactagaactcaggattaagaaactcactcaaaaccactcaactacatggaaactgaacaacctgctcctgaatgactactgggtacataacgaaatgaaggcagaaataaagatgttctttgaaaccaacgagaacaaagacacaacataccagaatctctgggacacatttaaatcagtgtgtgagggaaatttatagcactaaatgcccacaagagaaagcaggaaagatctaaaattgacaccctaacatcaaaattagaagaactagagaagcaagagcaaacacattcaaaagccagcagaaggcaggaaataactaagatcagagcagaactaaaggagatagagacacaaaaaacccttcaaaaaatcmatgaatccaggagctggttttttgaaaagatcaacaaaaytgatagactgctagctagacagtctatcaaagaagaaaagagagaagaatcaaatagacgcaataaaaaatgataaaggggatatcaccactgatcccacagaaatacaaactaccakcagagaatactataaacacctctatgcaaataaactagaaaatctagaagaaatggataaattcctcgacatacacaccctcccaagactgaaccaagaagaagttgaatctctgaatagaccaataacaggctctgaaactgaggcaataattaatagcttaccaactaacaaaagtccaggaccagatggattcacagctgaattctacgagaggtacaaggaggagctgataccattccttctgaaactattccaatcaatagcaaaagagggaatcctccctaactcattttatgaggccagcatcatcctgataccaaagtctggcagagacacacacacaaaaaagaattttagaccaatatccatgatgaacgtcgatgcaaaaatcctcaataaaatactggcaaaccaaatccagcagcacatcaaaaagtttatccaccatgatcaagtgggcttcatccctgggatgcaaggctggttcaatatacgcaaatcaataaatgtaatccagcatataaacagaaccaaagacaaaaaccacatgattatctcaatagatgcagtaaaggcctttgacaaaattcaacagcccttcatgctaaaaattctcaataaatttggtattgatgggacgtatctcaaaataataagagctatctatgacaaacccacagccaatatcatactgaatgggcaaaaaatggaagcattccctttgaaaactggcacaagacagggatgccctctctcaccactcctattcaacatagtgttggaaatctggccagggcaatcaggcaggagaaagaaataaagggtattcaattaggaaaagaggaagtcaaattgttcctgtttgcagatgacatgattgtatatctagaaagccccatcgtctcagcccaaatctcattaagctgataagcaacttcagcaaagtctcaggacacaaaatcaatgtgcaaaaatcacaagcattcttatacaccaataacagacaaacagagagccaaatcatgagtgaactcccattcacaattgcttcaaagagaataaaatacctaggaatccaacttacaagggatgtgaacgacctcttcaaggaaaactacaaaccactactcaacgaaatagaagaggacacaaacaaatggaagaacattccatgctcatggataggaagaatcaatatcatgaaaatggccatactgcccaaggtcatttatagattcgatgccatccccatcaagctaccaatgactttcttcacagaattggaaaaaactactttaaagttcatatggaaccaaaaaacagcccatattgccaagtaaatcctaagccaaaagaacaaagctggaggcatcatgctacctgacttcaaactatactacaaggctacagtaaccaaaacagcatggtactagtaccaaaacagatatagagaccaatggaacagaacagagccctcagaaataataccacacatctataactatctgatctttgacaaacctgacaaaaacaagcaatggggaaaggatttcctatttcataaatggtgctgggaaaactggctagccatatgtagaaagctgaaactggatcccttccttacaccttatacaaacagtaattcaagatggattaaagacttcaatgttagacctaaaaccataaaaaccctagaagaaaacctaggcaataccattcaggacataggcatgggcaaggacttcatgtctaaaacacgaaaagcaatggcaacagaagccaaaatttataaatgggatctaattaaactaaagagcttctgcacagcaaaagaaactaccatcagagtgaacaggcaacctacagaatgggagaaaatttttgcaatctacccatctgacaaagggctaatatccagaatctacaaagaacccaaacaaatttacaagaaaaaaacagccccgtcaaaaagtggatgaaggatatgaacagatacttctcaaaagaagacatttatctagccaacagacacaggaccatcactgaccatcagagaaatgcaaatcaaaaccacaaagagatatcatctcacaccagttagaatggtgatcactaaaaagtcaggaaacaacaggtgctggagaggatgtggagaaataggaacacttttacactgttggtgggactgtaaaccagttcagccattgtggaagacagtgtggcgattcctcgaggatctagaactagaaataccatttgacccagtcatcccattattgggtatatacccaaaggaatataaatcatgctgctataaagacacatgcacacctatgtttattgtggcactgctcataatagcaaagacttggaaccaacccaaatgtccaacaatgatagactgtattaagaaaatgtggcacatacacaccatggaatactatgaagccataaaaatgatgagttcatgtccattgtagggacatggatgaagctggaaaccatcattctcagcaaactaatgcaagggcaaaaaaccaaacaccgcatgttctcacttataggtgggaattgaacaatgagaacacttggatacaggaaggggaacatcacacatgggggactcttgtggggtggggggaagggggagggatagcattaggagatacacctaatgtaaatgacgagttaatgggtgcagcacaccaacatggcacatgtatacatatgtaacgaaactgcacgttgtgcacaggtaccatagaacttaaaataaacaatacataaaaaataaaaatgaaattatgagtgaaaataagtaattattaatgctttaagccacctaatattttagctaatttgatatgtagcaatagctaactaatagatgtggtaatcaggcacttatggctaccaaccatggctagtaataaatttagaggacaccttgatttatcttctggttttagaatggcaatgataactcttctggcagttcccaaacaatcattgtgtttgtttgtttgattgttttttaagttttagcttcttgaataaatttttaaaatccagactaatattttccttaaattatttgtagtagatacaaaagttactgaaccaaaagtaaatctgaagctattattaagaaatttatagtgagtgatttggcgagaatgtcagatatcatatttttaacacaaatttttgttttaagttcaatcatttcactgaccacattatctgatcttttagtttgatatacttgtatgtattagcctccaaaattaygtctcagaaaaataaaatcacattaaagaaatgtgtttttctctaattatttttaaattgtttctataacatgagcatgtacgctttatttcgaaaggaactaagcattgttgtgggtggcagatggacagaagtggtaggtgtggttctgtttttaggctgagagcagatgcagcactggggtgtgaattgttctccccttcacaggcctggctctgaacatcctgtggaactgttctgcctcaggggattcccccactgttggctttccactggggcttccaaaaatagacatttattttagacatttaaagacttctgattccccaggaattgaagttagacccccaattcatacagctgtatgcttaaaggctgagaagtcagtggctactttctctgtatgcattttctttatccagttgtgatggggaaatttgaattgaggagtctcttgtctccctgaactattaaaaacctcatttcctttacagtagggcatgacatctaatgtgccatgttttctgacgaggcatatattttcatttcagtaaatactaacgacattttgaaaaaataaagaatgtgttttcagtggcttagagacataacctagccatggtatggctgattagtcttttacttttatagattcaaattcgagcatttaatccatttgtatctctagtctawgttttcattaggccccataaggcctctgtagagaagcatttaatgatttaatgtctcatcagtatttggtgccctttcttctctattgggcagcatgcctcagcctgtaggctttcttatgcagctatggcccacatcgtctcttgtttggcatgctgaaagtgcagaggaattgatacctctgtcagcaaccctcaaccaatgactgataagagctgatatactattaccccaccttcctggctccctggagagttttactctgatgttatgtattttccattggctctcaagtgtccctttgaagattaagtttagtcacctgcggtgatggctggctagataatgtagccctttattaattgttttcccttccttctttcacatccctttattccttttttcttgtgggtgttcccttcgcccctcaaatgaaccacttgccctgaatccttgtctcagggtcggctgttggaagaaagcaaagtatgacatgggtcattctattatttggttaatttcaatttctttaatttctgtacctgatttctttttaaatatatatcttgttttaatagcttctttatttttctggtcaacaagcccagtaacatttacgggtgttgtaagagacaaaaggtagtatctttccttacccattgcaaggctcgtggctgaggcatcaataataaaaaaacagagtaataaaaggaaagcatacaaatttatttaatataagttatatgacacgggagccttcagcaatgaagaccacccaaaaaagggaaaattgtgtatttttatgcttaggtttcatgaagagcagacagctgtgtacaagtgattggataaaatagggtataatctaatggtaataacttggagaggggaggacttagcaaggtctgtttgttcagattcttctctgtgttcctgtgtcttcattcctttcctctgactataggaatgggcccctctggaaaaaggtcttgtgacctattttattttatgtatttatactttttattttccatttgcaatactgtttatgacctattttagaggaagatcagagaatgttttcatgacctgcttcaggggaaaatggcagtaaagaggtaagagaggttttcttgcttctgttgtcttctcaaatgccaagctgccatattttggmgtcaaatttcctgaacctcatggtggccattcctgtagtttggatcccagaagctgtattaaagaacttggcaaaggctaattgcccaggggacactataaatggtgccaaaagaacatttcattgcaaaaatgaggtagtaataatttgacttacggtaaaccagatgagtagtgtataggtttataagaaataaggtgtttggggtttgaagggagtgagatactcacggaggattcttaagtgacaatagatggtaaactcttttaagatgtgtgggaccagttaacctctagtcttgctttgctaaacagacagcatgtgaatttgggcttgaatggaagaattaaggataacaatagagagaaaagggaggtaagcattgcaatcaacaccttttcctccacaaagtactcagcattttttcttaatgaatgtttaatacagatttaaagaaagccactgtcacgacattgccaaaatattggcctttcaagtacccatatctcagtcagcttctattgtcttcaaacaatgtattttgttgttcctttttttttgagacagagtctcgctctgtcacccaggctggagtgcagtggcatgatctcagctcactgcaagctccgccttccgggatcacaccattctcctgcctcagcctcccgagtagctgggactacaggcgcccgccaccgcgcccggctaattatttgtatttttagtagagatggagtttcaccgtgttagccaggatggtctcgatctcctgacctcgtgatcctctcaccttcacctcccaaagtgctgggattacaggcatgagccaccatgcttggcctattttgttcttacatataccactgactctacttcttgaagtcatattaaattattaatagaagtatgtgagacataaattataaatagtatcatcagtattacttttttctttacagaaaatagaatattaaaataaatctgttaacccttctttcatcaagacccataaaagctcttcattaaattaatatttgaaattactgaaatagaagtattaagttaaaaatctccagaaagtttgataactctttaccttttctgatgcatctggaactttccttaaaaggcatgaatattgtgaacctttagcagaagtttgattttttttttttaatattggctcttgttatgggctgagatgaggcactgaatgcccttgaattctcgaacagaacatgctagaaagagtaactgtttttgtgagctgaagagcttttgagtttggagtagtagcaagaatgtgtgtaaaatacaaataaaattgttaaccacttgatttctgatgtgtgtgctgagaattggtaatcagtcaaatgtcaacgagctgatggtgatctggtctatgaggttcatatctgggccaatgatggtttgtgatcattaagaaagagtctaagataagaatctattaatgaaagcagtcacaaagaaaccactgtgctaaacgtctaatattacasgtactctgccagtgtttctggtaaagtgtctaaacacgagagtggtcacaggatttttttcatcatctacctaggactagagtccttgctattttcatgtgaaatgactggtgaaacatttttgatactttttcttttttacttttgatcccattctcttccatgtaattttatttttcattaaaattggcttgcaaaaagaccattaagatacactgtgtagctgtcaatcagtgggcccaggaagttcctaaatgataatagttgattcagcacactagcttatcggagtgatctgcatggcagagatgtcagtgtgttgtttccaagcgcgacttctacacacaaggagtagcagagcatgtccctgcctcttttatcttcctcagaagagcaaccaagtggcataatcaattcttccagcctttgtatttcacctcatatttactttatgcattgcgttgagatttgcccttattttacttctttaaattgtatttgccttttcttttttatcttataagaaaataaaattatcttagtgcaaggtcatggtgcatttcatgaaacactcataatatttttcttttctcagyatccacaaaccagtgaaaatttgtcctaattactgaaagattgtcagactctggatatacacaaaataaccttctctgtaccaggtgttgagggaattggagctgtgcagatggctttgacgcagtgactttactggtcactgacatatattattgtacctaagagagatcaagcatgagcttgacatctttcgtgttatgaatatcaaaatcaaggaagtgtggattttgtctttaatagatgaaaataactctgtgctacttttgagcattcaaagacttttgtccttttgttttcagttgacatgtaataattgtacatattgtggggcacacagtgattttatacatttatacaatgtctaatgatcaaatcaggggaattacaatagctatcacctcaaacatttttcatttctctgtgttgagatcattcaaaatcctctcttctagctttctgaacatatacaataaattattaactacattcaccctacagtgctatagaacaagaaaacgttattcctacctagctgtgatttttttttatcaattaaccaacttctccctgtcctcttctctcttacccttcccagcctctaattctgggatttctgcaaatgaccaacctggctttttcctttgggtttgatgcatttgttttgcaagtcacttaattaacaagatcaggataccatttctgggtattaaaggccctattaggaaactccaggtcttttctttttttattattattatatttcatttattttttaagttccggggtacatgtgcaggatgtgcatgtttgttacataggtaaacatgtgccatggtggtttcctgcacctaacaatccatcacttaggtattaaggtgcttttttttagcagtcaaataggtatggccactactaggccatggcttcttttgcagtgacatttgctcaataaacttttttcatggcaataactgaaaaaagtaaagtaaaaaaaaagtgtgaagaagtaaatgtcatattcccacaatgcaatataaatggaattcataaaggctcagtgactcgtaagacaggttaattaaagcctccctktggcaagtagaagttaacacaaaattttcttgaccacattattttcatgactgcatagaatgaaacctttgttagaatgtctggcagagattgtgatctagtgttaacttgctattgctacttaatttattttggattattttaatccacttcccattccagtaaggaaagttttaagggctgatatttaataggaaaaagcaaagtgttgcaaaaaggcaacacagtctctgtctcacaraagttgctctatcaatacccggaataccatcggagttctgtagcctaaatgaagaaaaatcagctggtgcaggaaagaaaaaacattataaatttagaagtgttttaggtatgacaattgttcatctctcttccctgcatgttcctacggggcccaaaacataccttgctatttggagttaacttttctgtttccttaggactaagaaaccaattgtaataaatagctccaaaacagaaacgacatttaaaaaacgttggggccatcttgcatcgaagttggcattggggagtaaagcgacagcttatacttcctcagtcttcccgctagccccttcagcctggagggggctactagcttcttccaggtgttctggccacagctcaaaggaagcaaggaccgaatggggaggtggtgctccctgtgagctttctcgataccggctgtttttctatatgcagtgggtcagagcattgccgttcctttattattcccaaacaagcaaataaaatgaaaaccaacataaaaaagaaagtaaaacaaggagacttttacttgtgtcaaagaaaaattattttgagtcttggtaaaggaaaataaccaagcttattatttcattacaaccctaactgtgaaatgatgtcaaattttaaatcttggaattggataacttccaggttatctttttatgtatctatctatctactcttttggtacgtgtgcatcagagactgcagatttcctaccccagtgccctttaattttttagcgtggcacatgatcatgcaaatcaagatatcatgtttccatgcacaggcggagtaataaaggagaaagggctgctgcttctggaactgaaaggattagctgtttcagccagggactctctcgagcagagcacctttcagcagaaagataaagacactccatcttgtcaaagtcatgactattttgcattttactcctagctgtgcacaaccatactattagggttctgggattatcatgaagcaattgagaggccaggcagagttgaatagtttagacccatagtcagaagaacatgtttgagtcttgcctcagcttcttaccaaatatgtatctttgggcaacttagttgttctatttgtaaaaggaggtgggtagcagtttctacctgactgaataatgaataaataagatagtaccgtacttgggatcaggcgatctttccccacaaaatgatcaaatgtcagctagcatgtatgtgaacatctgagatatttatccatacatttaataagaaaaactaataaacacaaacatctcttttgcattttacctgaagatttcaggtaaatatatttcagtcatttttgtaaaattaaagtaacgtggccgggcgcggtggctcatgcctgtaatcccagcactttgggaggctgaggtgggcggatcacgaggtcaggagaccgaaaccatcctggctaacacggtgaaaccccgtctctaccaaaattrmgaaaattagccgggcgtggtggtgggcgcctgtagtcccagctactccggaggctgaggcgggagaatggcgtgaacccaggaggcggaggttgcagtgagcggagatcgcaccactgctctccggcctgggtgacagagagagacttcgtctcaaaaaaaaaaaaaaaaagtagatttaaaattacaatagaatagaggcaaaatatttgttttatcccaggcctcacttgggaaattactacaagtgcagtaatttcattatgcataataaaatataacaaatctgaaaccacatttaatagaaacttcagagtatttgttcaataaatgtgcatttagaatatatatgttaaaatatgcagacaatataaatttccttacaatatcaaaaaataaagtttcataaagttaaaaaaatacaaaatatgggttacagataaattaaggtgcttataaacacaccgactttcccccaatacttagactctagttctagatgcagcattctgcaagttggtaataacatttatggtatatatgtatcacatattgtttcaataaggtttatatgtttaataaatccttaagaacagaaagcttgtgtttctattgcttacttagttgatcatttatttctaagaaaaaaatagaataaggacatcagaaatgcttcaccagtgaaaaattaaaaaccatcataaaaattactttctactgcatgacaaatgttaatttgtgggcatgataagagatttaatatttgacaactttttgtgtcattgaattttaaaaattcatattactcaagtaataaaataagaaaaatatcctacaataaattatcttactggagttgtgattaatattgaggtggtattggaagaattagtaagttaatgtttctgaaatattattggtcataaaataaaagctamatrgtaactacaaagtattatttctcatttattatatttacatggcttagtatcagtggttctaaagtatattgaaaagtccctttttaaattgtaattattaattatcaccaattattgatttgttatttaaacagaacaaggcttgagacaagttaggacaaaaatctctgatgaatttagatcacaacttttctctagaaaggacttttgctgttgttaaatattgtgaatctgttacccaggactctgtaaatatttaggaaaagatatattcatttcaaaatatagagattaatagttattacaatccccacatagaaacaagcttaggaatcatcagtcctgaacataagataatgttaaatgaatcctctaytcacttaagtaactctccttttcttttctgctaacctcatctaaattttgtcagattttaataccaccatatttaactcatttaatcttaatgtgagcttgcttyttccttgactttctattacattcttttcttttagaaattattcatcacttcctagtgaccaaatccaaytcctcttctcactttttatcttctttattctgctatatgcaggattggaagctatctcttcttaaaatagttyctgggaccaagtatcccttcatttgttccttaygacattcgatcacttcctcaacatgtactcctcagaaatgcttcaccagtgaaaaattaaactcatacagggtactgtatgagttaggcagtactcagagggagcgacggcattggggcatcaggcaaggcatgggctccccattcactctggatgtgtatctgtttccatgacaatcatattcccatttagctatttgataaatatttatggaacacccatatgtgccacaggactcagtgctagagaaacagtgatgaacagttcaaaatataggactctcgagaactcaagcaatccttccttcctttattcattcgaaaatataatttatcaaaaacatattatatatcaggcactagtttagacagtggcaaaggggggaaaatgttcctgtactcataggattcatgttatggtagggaatacagacaataaaataaatgagcaaggtaatatgacagaaggttataaatgccatgaagaatattaaattatgataaggtatagagagtgaaggagatggatggtattttcatataaggtggttaatgaaagcctgcttgaaagaggatttttttttttttgaggagagtttgatggaaattggaaagtgaagcatgtaaatatatgggagaagatcatttccagccaatgtcatgtctgcagatttgacgtggggttttgttttgtgtgtttcccatataggaaggccagtgatcccagagagggatgaggcaggaaaatgagattagcgttagataaaccagctcatctggggccttttaggctgcagtttgacttttattcctcctatggtggaaagcctgtggagagttttaaggattcctttaactgttgtgcagaaaatagattgtgaggttgtaagaaggcatgcaaggggaccagttggaaccagcatcctgctccaagggagataggaaggtggctgagctggggcagtgactatcaaagttgtaagcagtcttactgaggaggtatttaagaggtagatattgcataaattgctgatggttcgggggtgggattatgtaagaaccayagaacataattatgactccagtgttgtttctcactctaggaggtggaaaagactggagaggaccagatttgcttactctacttgctgaagtgtaaaaggctgaggacagcaggcttagggtgggaaatcaagartttagatttgttcatattaaatgtgtgtggccaactagacatctgagtgtagctatcaatcaggttattggatacaytgacctagagcttggtggagagtttgggaatatagatctctattctggagttgtcagccatgggccttgctgaaatcactgagagtgaatttgataaaagaaaaatccaaactgagtcctgggcactctgayatttagaggtgagcagtaggaggaagattaagcaacttgaatgagatcattcggkaatatgtggtgtccagcagccctcgtgaagaaattatttcaaggagaaatctattatcagctctagtactatggaaaaattgaataaaatatgtcttgagaattgtccattgggtttggcaacatgaggtcactggtaatcttataaatgctttcrgaaaagtgtggataacagaatgagtgaggtggatttaaaaagaattagaaacaaggaaacagaaacagctattacagataactctaaggaagggtgtttctataaagaagatcctagaaatgagttgctagctggagaatattgggacacaggaaaaacagttttgttaatttaagtagaaaaagtgataggataattttatgctataacaaatatgctggagagaaggacaatatgaagattaaacagagcagatataacwgtgagaatggtggcactggccatggaaaaaacaaagtatatttggagttcagaatatgaacagaaatctatttgtatatctcttccaatgacctttctgtcccagagtaagtcttcatattacttatctattgctgcataatgaagcatcctaaaacttaatgacctaaaattacaatggtcatttactatcccataaggtcaggatatgtaggccaaaaatttgtgaggagctragttgaggtctggctcagtttttcatgaggtgtagttagaggtcagctgggctgrcagtcatctgaaggcttgactggggctgcaggatccattccccagggatcccactatatggctggtaagttggtgctaacaaggtgcatcctctccatgtgagmctctccacagggctttttgagtgtcttcacaagatggtggctgaatttacctggagcaagtgatcagagactaagccaaaagctccagtagctttatgagccagagttgaacttcatacatggtcatatctaccatagtctattgaccacacagccagccttgattcagtatgagaagggattgctcaagggcataataccaggaaataaagatcattgatggttattttggagttgactaccataatcactaactttctttggactttcaacctttcagtatcctcaattgttgaatatgcagattttgacatatgagccccaattcccttctaactccacaatttcatgattttcttctttggctaggcctatggcactcaaagggagcatagtcaaagagtaggggtagagtctgctggaatcttctgtttcccagcctcttactaatttatattcagttcaatgactctttcttggaaagcagagtatgtgatgtttctgcatattccagtgcacaataagtagctttttgaataataaaattaccattagctggctcataaactagtgtttaaaacaaaacaaccactcggaccaaaacaaaaacaaaaattcccctgctgttacttaagttgacttactgaatcctgattaggaagttcagcctgaagagtcctctaggaacaatattagatgactaaaagagtcaaagtcccaggaaatcaaccactggtgctctaatggaagggccaaaggctttggattaagaactgagtttgaattctgtctcttaaccaatttgctaaattttagcaaccacataatctctaaaatgtcagtttccttatatttaaacagggatgatagtaactccttcataagattttttggaaagaattaactatgttaaccacataaagtgatgtaacatgcccacacttgttaggtaaacacataagaggtgtttaataattgttattttttctctggcctatatgttatatcctaatctcattaagtaccaccagatggcataaccrttgaaaaaagtatatttacaatatttgaaagaaaataatattttataaaagaaacttaaaatagccactctacctggtgtgaaagccccaagacagaattggtgaaattttctttcctggctcatatctgatcctttgtcattcttttatataatcattgactaaactactgaatgccttctctccagtttctccccaaggctgggatgcctagggtggtgtaatagaatttaccaatatctagtgtcctccctgcaagagaatgatgcttttctaccagttgaactcaagcgagctcacgtaactttctttagccagataaataagatctagcatatcctgtagtaygttcctcatttcctccaccactgaagctgtgagtgtttcatataatgggagtaaaggtgatgacaatgcagagtagggycctcagcctaggatcacaaaccaggggcaaagtatacacctttttwtcttttaaccactgagatgtttgggttatttttatctctgctgactgacacatatggcaagttttataaacagtatttaagaaagggtctcatttatgatatcaactcatttatgactatattaccaatatgagggaccaaytgaaagagacaaagtgactcgtgcagaatgttaaagaaattagccaaagcttacttcgtattttgaatcttatatccacttggagagtctaaaagattattttgttatttatttatatatttggtgtttagayatggtctcgctatgttgcccagactggttttgaactcctgggctcaggtgatcctcccagattaacttccctagtaactgggactatgggtgcctggctaaaagatcatttttaaagaagcataattttgtgaagtgatcaatgaagagatttatttggagatagcagttgccttgctgtgttttgccgccccatcccatacattttcaggggagggggtggrtgtgttgctaccttctgacactaaggctagctagagagcttcaagaagggatacttggaatgccttgaaatgtatttgctgaagttgagagacgcaaaggattgaggcctgaatcctacctgtgaaagatggaatggattgctgattgggatctgacttatgtctgggaaatatagagagcaagaaaaatactaattggtggctgagtgaggagagcactactgcatcgggatctgctggtcttaagtcttgcggtttgtctggacaagagatgcatttgtatatttggaaatgtaaaccaaaaataaaattctaaggccccccaatcatctgaatggacttccttttgggcatggcactctaaaatttaacctgaaagactggctcagaccatgacaggaagtgggggccaaatatgcctcattataccctctagcattaacatcaacacagaccttatgtctgataagaaacatttacattcctttctattgataataactcttttggccaggtgcagtggctcacgcctgttatcccagcactttgggaggctgtggtgggcggatcacctgaggttgggagtttgaaaccagcctgcccaacatggagaaaacctgtctctactaaaaatacaaaattagccggacrtggtggtgcaggcctgtagtcccagctactcgggaggctgaggcaggataatcacttgaacccgggaggcagaggttgtggtgagccaagatcaagcattgtactccagcctgggcaacaagagtgagactctgtctcaaaaaaacaaaacaaaacaaaaatacaaaactctttcaaccaattgccaatcagaaaatttttaaatttacctataacctggaagtaccccctccaccctgctttgagttgtcctgccttcctggaccaaaccaatgtttatcttaaatgtatttgattgatgtctcttgtctccctaaaatgtatgaaaccagctgcacccgaccaccttgggcacatgttctcaggatctcctgaaggctatgtcacaggccatggttactcgtatttggctcagaataaatctcttcaagtatttttcattgtgatrctttttgtcaacagaacactagagagagtcagtaggatgaaagaagtgttgggagtacattgtgtgtcccactagatatggcctcatggaagggcaaggaggtctcagcagaagggkctatagtcctgggatgccctggcattaaaatgaccacacagaagagaggttcatctgtcaagatgaaaggagcttcaggagaaaggggctcagcagagaacctaggaagatccctcaagagcaactcatgagatgaatggtcagttttgaattaccatcatggtcagggtgcagaattgcccaggtaataaagtactgtattacctcttacttttttcctccctccactcttttgaccttgctaggttaaacaactgctagtttcttgggggaggaggtgatcaggaagagagcgaatggcaaaggggctgtgcccccaccttcccactgtgggaaaggggcagggacaaggggtgtgtttgcgtggctgtgtagggtatgccctcaacattgactatagtgttctctgaattcccctgaacttttgagatggggctgaaattcagccaatgttacattggccaagtcctctcacctggctggggattctgggtctgctcagaggaaagggcacttttttctaatttgtgcagagacaccatattggcttacagagactctggagagaagactaataggaaattaaagtcaaatattttattcatatcataaaatggacattgtaacttccaaactgagactcagttcctgactatagtgtcatctgtaagtaggcaaaaaaaagtcatttgacatgctagaatgatcactggaaggaagaggaaggttactaaaattgactatattttaaaaggacagaggaggacaaaagtaaartgtacttgattataatctgtactgcgtgcttggtcgatgtmttgttwacatgtaaacacagagaaagatgcagaggtacagtgatgagaaaaagaagagagaaaagagagagggagaaagagactgagcaagacagagccctctgtcctcttcactctctttccacctcttctcccctcccccaccaaggtggccttttagaacaataagttaccaagttagtgcaacattataggaggaaggtgatcaatataaccaaaagagaagctttttttttttgtttttggtggtactttgtgttttgttgttattgtattgacatagttttcttgtatttgctccaatctgaataatgtaggaacccactactattatgtcaggataaaacaacaaatttatcactctagccttgatttcaaggtattacagaaatatggaactatgacccacaggtcagagtagaggactagccaaagaaagaggaatggagaccaagggggaaattgctcctaggcactcattcaagttgggttccgtccagactctaaggcaatccactgggatcagtaactaattactttgcaccatcctctggattctgaatttcgctgtgattactgactgtgaatactgttatttctgataatggacaataactacatattcttctagaagtttctgatatagatacatagattaaatagatatagagtacggagatttagatacagatacacagatatttttaaggcacttattcacatttgctttatttctgttttctctaccaaataaagcagtgttctcttcaattcagttcaccgttgagtttgtgatactgctgcgtgaaaaatgagcatacacgagcagaatttagttaggagcatgggttgcaatcagctaaggtgggcaatcagtttctctggacccatacctatttgcaaaaggcaaactcctctattcaaattaggatgcctcggtggaagggaaggttgaaaatgggtaccaaagaagattctaggttttattatgtctgttgcttttagagtagaaatttgtgataggagagaaacaatatgtatactaaacatgtgaaaaagtaaaatcatttcagatttgggatggaaggagaagctgaggaatcccctggcagctgaaatgagggaagatggagatagatttggaagggaagataatgactttactgctatattgaagtgctctggaatcttaaattatgtatatttctataagtttgacttctacccattgacagagtgttcatacctatgtgtcctgttagtttgctcttttagctggttgtttatcttttattaaaatatcaggtggctgacagtgtcatagtcagtgaagcctcagccaaaagcctgagtatattttcaacagatgatatttaggagattaaacaggaatgggcatgggtcagtgatgaggggtctacctcacctataggaatggcatcggtgggagcaggggtgctaccrattcaagtgagggctgacaaggcagcacaaacttagaatcttccaggcttatattattaatcatagtatctgatctgggggctggkcctttgtgacaggaatctcctggcaacatacttatacataggagtcaggcagcaagcactttttttcttccaggaattcactcttgtttgaagcaaacccagtggcattgactatgggcataataaatactccccacagaagaactgagatagaayctaggttgtgaaagccacagcaaaaagcctcagcttcctaggaattttcttrtcctagcaggggaattgaaatactaatcagtgattgggaagaaacccacttctctggcaggtcctcattactggaaggatgggagaaagaagggtgggtaacaaatgcttgtagctttctgggtttggagtagcctgggcttgtgagattaattccaaaatccatctactctccaatgttccaagtatgaatatgattatctctgaaaattctgaaagacaaaggctgaagtttggagtttgagcatatgcatttttttttttaatacctggagttgagcaggtctaggaaaaccaggaagatacagggtacatcaaggattgggctgaaaaataatgtgggtagtatccaaggacatgtttcctacattttgtactggaagttgctgaaaagagtgccagttcacacaaatgcaagagccaaattcttaaacattgaactttgaaatgctctggggggraaatctctaaagatactattttctaayaaagcacagcctttygatttttaacttcgatctaagaaaggggcacaatgggtgaataagactccttctagccttacttacagttcccagtagacaattccccaccccaccttgtgaattacaaagcagaactttcccccatcaattaccaattagattcagcaacagactcgccagaatagaaatgcactttccccctttgtccttcaccaaggagctgagaggtcctgtacagataagtaccagatgagctattgaggagtactaggcatttaaagtcatacatgagtgacttaaaggttgctgatattccacattttggctttacatattaaaaaacattttaaatttatgtgctcagaaatttttcttccagaaacacagcttatttggttgkccctttaaaaactttgagcaaaaatataacaactcaatcagtacagcacccatttcagtctaatgttctgaatcgccaaactaggagaactaagtgtgcttttaaacttggaaaatatgttctccactatttaacctaaatgccactataattataaccatctcaaacttatgcttataattctttctgcaagatayacaattaaaataaagtggtaatctaaacaaggaaaataaaatggaaccctgcaattacatagtcagacttttctcatgttagcacggaaagaagaaaggcattatttaattaaaataccaaatgccatgaggaaaaaccaagtataccgtaagtacagaagacagaagacaaaatcacatgtctaatacttgacattatgtataaatatgaattataccccaaagaaatactcctattctccatggtaaccattagtgaatgtatttkatatacagcatttaaaaaccttagcatggggacaaaaatgttgcctgcagctgaacggtagctcctttgtcagccagacatgacctccttggcacattggatccacagcctgttgtgttaagcccagcctgaatcagaagattcatttgagcatttgagattacaaattatgattgcaataccatcttaaaatgtcttttgtatttccattacccaaacaagagcagcatattgaaaacaaaataagtctggaagtaatattaaatagtcacttttaatcctcttaacaataattatctgtaggaataagccatataaatttaaatattaatttaagagtgctagtgaagtttttgctagacttataagctagcattctatttgatattaagttgttattataagtgaacttgatgaattataacttcctgattatctgcaggggagtctgcccaaaccattgccaatttgtagttaatatttatttaataagtaagtagaatatattccatttctaaaattaccatgtttgtaccataaaatgaagaacccatgtatatctgaatataaggagtaaatatgaaaaaccttattcaatgtatcaataagaatcatgactaataggaacaacttattattgagataaatgtaatgagcctgcccagccatataacccatatatatttacagatttaaaatatcttaaaaatgttaatgtatttatgccatatatacttatacacacaaaagtgatatcattaattacttcatttaaaaatatttacttataaagatgcagactatcttacacttatcacgttaagcacttgaatacaaacataatacactaggctttctgtaggataaaaggaagctataaaaacaagattcctggctaccagcagaattttaggcttcagttggaaatacaagattctgatttaagaacaactgcttgtatcctgcctacagtatgtgactgtgttgatcctcttcttccctattgatatcttctttggtttataaagcaatatatccttctgctgtaggatattacccctgtcatgcatggcttttttttttcttttcttcaggattttttcttcttttcatgacctttttatattagttgtcccaagtttctggccccagttttcttctcttttttatggcacacactcatgcagtttccatgcctaggctgttaaactcatgtctatattttcagctcaaatctttccrttgagacatgatgcctactggaaaagctaactgcttcacaacacttcaaacttaatatgtgtaaaatcaaatccttaattttactgaccttttagccagacacttttccttccctttttatttcctatctcaattaatgaaaccactatgcacctagctgaataagctggaatcatgcagctttgacatcacctgccctcaccattcatgcaccatctctcatcagttttgcatctttgatggttctcattagtgtccattacttcccatcccctttaccagacagccttaattaaagtctttataatgtcttacttggctgattgaatattttcagccttctaggctgttcactccaagacataataatgccagaatgatcttcctaaaatgcaaatattatcatgccacttctttgttttgcatattgtgtaggtcatcaaatctttaaggataagtccaaaattcattagtctgtaatagaaacctcttcatatccagtttgcaactctaccttaatttctggccacccagcatcttcaactctacttccataaatacaatgttacagtcccatatacactggcctccatgtctttgcacacattcctcagtcrtctagttcccatttccttttccaccctcattaactttctctctttccacctgttttcaatacacacatatatacacaccattgaataaatacatagataaatacaattatttcctcawtttcttcaaaattggctcaaagtcttagagaagattatccagtgacaaaaccacccaagactggagagtctattaagcactcacacaatcrggtgcatacctcctctaaagccattttcatagtgaatattaataaactgcttttatttttttactatacctccctctaaactgcaaagttgttagaacagttcttgatatgtagaaagagttcacattgktacttctaattattaagcagaagatcttggtataaaaaattttttaaaaacagttctatttaaaatagatggcagagatcaaggcgatgatgtttgttaatttttattgaagaaagaaatgattttgttttagtttcaagagtaacaaagtagtagctctttatcatatattcagcacaaacatgtaagtactagaataaattctttttttcctttttttttttttttttgatggagtcttgctctgtcgccagagctggagtgcagtggtatgatctcagttcactgcaacctctgcccctgggttcaagtgatttgattctcctacttcagcctcctgagtagctgggactacaggtgtgtgccacgatgcccagctaatttttgtatttttagtagagacagggttttaccatgttggccaggatggtcttgatctctttacctcatgatctgactgcctcggcctcccaaagtgctgggtttatgtactcrgtgaataaattcttttcaaattgacattaatttatattttatatttaargtttattataagcaataatttacatatacttcttaaaactttagttggtarctttgctcctaaaacttgttagtagctccaacttattaaaactaaaatccaaagtctttgcagtgtttagtgccagcccattccctctctgattatatctccttccacatagtatcctttcaatacatgttatagaatgaataaacttttgaatatatttttggaattctcagaaaggctatgtatggagttgtattgaggcattcctcagataaaataattgctcctgttctccaaggatctcatttgctgctggtttcaggcatctatttagcatgatgctgtcttaggtatttcctttgcaatataaaaatcatctcaaaacaagaattccaaaatacatgttttgtaaatttcctgtgcactatgtaattactatggagaaagcatatgttgggaatgaaaatactttaagtttagaccctaaatttacggcataattatatgtttggttttctagaaactgataaaatgaatattgaaggctatgtcaggtatttatttgaaaatagcattgtacactttgggaaattctttattttaggctaatcacttagtaaaagcataaattctgaaactccaaaaggaatattgcagacaattaagataaatttagttagatggaggcaaaaaaaaattaaccgtggtcttgctatggtatactagatatattgaaattatagtctcttgattaagcataatgactttattctatgagcttcattaactaggactttgctatacatattgtataaaggtatacattgttacctggttaatcactgtctcttgtcttaaaaataaaataaattttccatctcgattaaatgtttaaacaaagaaatgtgcaatatccagtctatttctttatatttcctttggagtcattatatcacttatggtttatttttcccctttttgtcagcatctatgttcttttacgagaaggacctgttctcagggtggtagtgtggaaatgaacaattaaaacaagcctttcttactttagtatttactaattaactgaacactttcatcagcagatctatgaagctttctttcctaaagttttaaagactaggcaatgtgaaaaagagactcatgtgcagtatgttctggatggaacaattggatttgttttcatcttatatgcaataacatggtgtagaaatcaatgaggagtgaaagcatgggtaattaaaagacgcttcattttsattttatatgaaatgttcttattctattaraaaaatcctgccaatctaacaaacgagcaaaacacacacacacacacacacacacgcacatcatgtgaattagaaaggtgctcatgttagtgcaaacaatgaatatcaattcaaaataagcttaatgcaaataagaatcatgcaatgaaatgattcactttaaaacaaaaaatgtcaacatgcctttcccttattaaagcacttcagcctggcatggtggctcacgtctgtaatctcagcactttgggaggccaaggcgggtggatcacgaggtcaggagttcgagaccagcctggccaagacaccagcctggccaatatggtgaaaaccccgtctctactgaaaatacaaaaattagctgggtgtggtggcaggagcctgtactctcagctactagggaggatgaggcaggagaaccgtttgaacctgggaggtggaggttgcagtgaggcgagatcccaccatcaaactacagcctgggcgacagagcgagagtccaactcaaaacaaacaaacaaacaaacaaacaccaaaaaacaccaaaaaacaccaaaaaacaaaaaaacacttcagtcgtttacactctcaacatctgactcaccagcctcctctgccagtacttcttccactgtctgggctctaggctcaaagatgttttctcagtactttaatgggctatgctcctccccaccatctaatatgtttcctctgcttgagatacaattttttccctcttygctaatccaatttttgctcatatttcaaaattccaagtgaagtatgagaattcttttggatcacctagaatagtggttagcgattgaggaaattgccaccacttagaaaatacctaagaacatgcagaaatattttttattgtaagagtgactccaggaaagtgatactgtcattgaatgctcagcaaccaggaatgctaaattatccacaaagggaggttgattttgcacaaaaaatattttctttcaaaatgcaaataatgatcccccttgagaaataatgatcaagagaatagatcaagtcctttatcaaaagttctagtagctccctgatctctacttttattscaatcttaaataaatacwtttattagttatttaatattaggacaaataaaattatttattttggcagggatctttattcctgatgtttccttccatatgaagagaactcaaatttgtaacattcttcacctacaccgtccctttattcatcctccctcataggagggaaagaacttatttgatttgyaaatttggaaaatataacccaggaatccatttagcttacttcatctcctttaatgggctgcctgccattccactctgccttgtgggaaactttacagtattacttgtgtcttggtgggtaaatctgcctatttgtggggtaagatcagcaagtgaatttgactttctccctcaactccatcttctaccagtaataaatgtgatatttgactatcatttaacattcctttttaaactctcaatttgttagtccccctaggaaatctcaacatttttttaggctaggcaacttgttaaaaaataaatcacagagaggaaaatgtcagggagcaaaataaaaacaccccaacactggccaacgggcaggcacaggtagcctggcaagcagaaatgagaacacagygacctcagcaawggcacagcccttaacaaaggtaagaaaatcaggcagactatgggcctcagcaaaactgctggtttttaatgatgtagatgtcttcaaggttcacgatgttgcaggcagagcttttcctaaacaggcacaggtgaagcaaagcttyatgtgtgagagaagacttggtaagttgcactaggctggttctccaaaattccattctgaattcagggccaataaagaagatctgaattgacaatttttaatttaatgtagcttatcatttggctcaggaattgaaactggtgaaataattgctgggtgtggttcagtgattcggttactataactgggcctgcaagtgctgcttctgctctgttggaacattcccaagaactttatgaaaatcagaaatggagaaatggcaaagtctgcagaagcatgtgcctgtgcaattgaagcatcaacagcagcttcaatacagaaaccttcaattcagctcagaaggtggcgtatatgctataacaaatacaagtacagaatagaaaacaattctttgggcacagctttcttagtccttaggaattctttaaagagagtcagtggcagaaacaactgcacacaggtctatggtgctgattcacaagaaatggtggtggctatgttactagacaaccctcactgcaaattctggatcggatactgagaggaaatagaagttaaaagatttggaaatatgctgatttgaaaagaaaaacacacatttaagaccacttgactgtgtctatcaccatttttttttttttttgagacaggttcttgctctgtagcccaggctggtgtgcagtggcatgatgttgactcactacagtttcaaactcctgtgctcaaactatctgcccacctcagcctctagcgtagctgggactatagatgcacaccaccatacctgggtaatttgtttttgtattgttttggtagaaacaaggtcttgttatgttgcccaggctggtctygatcttccagcctcaagtgaccctcctgcctcggcctcccaaagtgttggcattacaggtgtgagctactgtgctcagcttctgtcaccatttttaaactttctgagatctgctctctgagagagaatatggtagacataggaaactcccacccgccccacccccagccctgatatgtcaaatgtatagtgtgaaaattaaatagctagaagtttctgtcaagttaaatttacaggttatgtattctggaaaacttaactagtattccgatgaggctaagccccaatacttttccccatttaccctcctgttcaaagagacacttgaggttcttctgcattgtttggccaaaattgagggaaaggtttttcaccttatcctcatttgtttcatattttattatatcagagtttctgtcttctttcaatcacattgcaaatcctctcatgtgctgcatgagaaagatgactggacataatttgggatgagtgaaattagccctggtaacagagcagccttagtgttaatttaatttgttctgtgacaaactgataatcagctatactaaaattcattctcttgttattctataataactgaattccctattttacttatgtgcctattggaaagactacactttccagctttcacacctttcatgaagtgtggccttgtcacgaattaattggcaatgaaatgtaagtagaaagaacattgtgtgatttcaaggaaaactctgaatatgactttcatctgtattttttttttgtcctttcctgttctccttccatcttgctccctgagaagcagatgtgatggctggagatctcacgaccacctttaggtttgaaaacaggggctacgtgtgaaggatagaggagcagagacatggaaggagtctggattcctgatgatgtgttctgtttgagagaatggaagttttattatacaagcaaccacttaagtgaattttatttagcttgcaacaaacctaaccctaactgataatgtctaagtcacttcagagccttttaatgacaaaagccgagtaaaaccctgaagagtgtctggggaatggtctaataaaggtaagataaaaactactttaatgaagttgtttttttttttcttaaaggaaaaagtcactgttgacctgttgataatagatttgatggtaaagcccgatgagttaggcattaaagaaaaaagaaaaacaaagcaaaatgaaataaccaaagaaaacccataagacaacgattcctccccactgtagccacatcctgccccttggtgggcattcattagtcattcctagcctctctctgcccttctcctcattccatccagggaagcaaggtacaaaatgagcttgcttagctgagctccccacttctcttttctttctcttcagagtgctacctgtagaaaaccagagtctcttctgctcctccaagaagaaagctattccatgactgcatttgagagctgcctaatttaggggttcagttagcagacctatttgacttgtatatcctgtaacttagccgttgtcagtaatatcggtgatatttgctttgtcttcattttctattcattttccatctttctcagttagtttagaacttagggagggaaaaacgttgctgttatttgggtctgcctcagaagcaaagatctgatacaaattcaaaagttttgagaattaaggccagaagtaaaattttagagagttggcagaataaatagtaaagaacccagcccagttcctctcccactttgtaagtacctaggccccaaacaatccaagtggggtgtttcagaaacctggtaggacacagatgccaactaaatggggtaagaaaaagagagacaaatagagacactaggctggatgcagggtcctgatgtcagtaacagagggcagttaccacccctattctgcagaggcaagggagggagtacttacagggacctgccatggacaatgctgtgtggagagaactgtatgacggaatatgccctttgctcaagagaagttgccagcctttggacaccctgtagggaggaacttgggatgtaagctccctgtgtccacctaccagagctcattattggccaaacccaaacagaagtcagaaggcactggagccttctgatatatgcatgtcagtggatgggggccaggacaggatggagaaaagggtggtgtggaactggagaggcagataaccccaaaggagagaagccttgaattggatacattttgctattataatgattggccattttacattttgaaatgaggctgtcttctaaatacaagagattcaaaaaatgattagactaatttgacaagttatccgtgagcaggaaaagaaccagtccacagattgtgcccaatggagaaaatgaataaagttacatatatgcaccttattgaattcagttcattcaacgagatggatacaaaggtgtatattggggttgctcaactttggcactgttgatggtttggattggatgatttttttttttgatagggaggttgtcttgtacattgtaggatgcttagcagtgtatctgacctccacccactagatgccaatagcaygccccaagttggaataaataagaatgtctgcagacattaccaaatgtcccttgggggagagaatcaccccgacttgagaacgactgagttttacccctctccctcttcttagtaacaaagataactgcttcctttctccctttatattgctccacttcattaaacattcattcgttcagcaaccagtcagaactgggaggcagatgatagggttatttggcccagcatggaggttttatagcatttgtagtgtctcctaatataggcttcttttctcttttctttcttttctttcccttgcttttttccccatgaaccatttcccaagctagcttgagagaataaaaaaatgaccttagtagtaaaaagtttggctttccagccctaatactcgggtaggtctacagtagtgaaagagtccgcatgtttctttctcttttttgaggtccctacccctcagctaggatgcttagattatgatttaattgctcactgaaaagccaccaaggattttcttgatctactgggaaccgatccaaagatgcaaattttattttattccacttgagaacgaacaaagtttcagagacccattttttacaaaggggatacttatgactaacctcctaattaaaatatttttggttactaaaatgtactatttataatccaaaattagcaaatctcttcctgaagtctctgaatcagcattcgaagtkcacctggtgttcagtagttgatagtcttcctttctrttacaaattactcttggtttagcaccattctcggtttagtgtattgtctsttgttttactttattgtcaattctatgaagccatgtaatttgcatatttttggccccaaatcttttaagataaatatgtattgcatttcaaacacaaattaatgatgttgaattactaaaccaaatgtatatacagttctccttcaacatttgtcccatatgcttcctcttcatgcataactgcatgttaattcgtgctcttttaataacagcaaatatatgcagtaaactttctgcataagtgttgagcttayaggacactgaatataatgcaaagtactactgataagttggttgtcttcttctgaaaaaataaatgattattatttcacatattatctttcctaatatttattatctttggtttattttttattattttaccaggcagtgcaatttcatagggtaaatragaaaagagtcttttcctcaacatatttattttttgagctgtaaagtacctggatttcattattttgaccccttgagaacattttttaacaaatgttcatttatttttcttaacagatcaattattctcaatagatcatatgtcttctttaatgcttccctgccaacattttttargacctaatttttactttatgggtgaggaaaatgattctcagaaaagtatacccaatcattttttctaataaatgtttacagaatatatagaattttatagaatagttaaaacacaatgttttaactcatgaagtattactgtgaacaaaggagactgagtcttatatttgcaaactggwctttgtagtctagtgagagaaaaaaaatgataaataaagcaagaaaaaaatacagtcagtcagaygataagtgccaaaatcattgagagcaacttcttcttccatctgcagtagcaagagttctgcttcctacactttagatattattttaatttaatttttggaaagtctgaagttaaaatgatacctccctgtctttgttatgtttttaataataaatgaggttgaactttttaaactgtttcttggcactttctttttctatgaactataattcctttgctacttttccttttattatatttctttttctttatttgttctttgcattctaaggtaatttactctttgaatctcatgtattgcaagtacttttcttactttgtaaattttctaaaatttggctacttaacttactatttataccaaaaccaactatacagtcatacaaaccttaattttaaataataatataaaaattctagaagaaatagtgggaagtggataagaaaattaatataaattctgaaaacaatgaagaagaaaaaaactaataatttttcctaagttgctagccatttgtcccaacatcatgcgccagcatccacatttcttcactaacttggtattatatatttttcatatactaaattcccatatctacctactttttgactctgagtctttgggctctcactccacaaagcactaactctttaatttattgttacttttgaaacattttaatatagattaggaagaaatccctcaataatctttttcgaaaaatctctagaaattctcccttggttcttatacatcaataacagacaaacagagaggcaaatcatgaatgaaatcccattcacaattaccacaaagagaataaaatacctaggaatccaacttacaagggatgtgaaggacctcttcaaggagaactacaaaccactgctcaacgaaataaaagaggacacaaacaaatggaagaacattccatgctcatggataggaagaatcaatatcatgaaaatggccatactgcccaaggtaatttatacattcaatgccatccccccatcaagctaccaatgacttcacagaattggaaaaaactactttaagttcatgtggaaccaaaaaagagcctgcattgccaagacaatcctaagccaaaagaacaaagctggaggcatcacactacctgacttcgagctatactacaaggctacagtaaccaaaacagcatggtactggtaccaaaacagagatatagaccaatggaacagaacagagccctcagaaataacaccacacatctacaaacacctgatctttgacaaacctaacaaaaacaagaaatggggaaaggattccttatttaataaatggtgttgggaaaactggctagccatatgtagaaagctgaaactggatcccttccttacaccttatacaaacagtaattcaagatggattaaagacttaaacgttagacctaaaaccataaaaaccctagaagaaaacctaggcattaccatacaggacataggcatgggcaaggacttcatgactaaaacaccaaaagcaatggactaaaacaccaaaagcaatggcaacaaaagccaaaattgacaaatgggatctaattaaactaaagagcttctgcacagcaaaagaaactaccatcagagtgaacaggcaacctacagaatggtagaaaatttttgcaatctacccatctgacaaagggctaatatccagaatctacaaagaaacaaatttacaagaaaaaatcaaccccatcaaaagtgggtgaaggatatgaacagacacttctcaaaagacatttattcagccaagagacacatgaaaaaatgctcataatcactggtcattagagaaatgcaaatcaaagccacaatgagatatcatctcacaccagttagaatggtgatcattaaaaagtcaggaaacaacaggtgctggagaggatgtggagaaatttgaacacttttatactgttggtgggactgtaaactagttcacccattgtggaagagtgtggcaattcctcaacgatctagaactagaaacacaatttgacccagcgatcccattagtgggtatatacccaaaggattataaatcatgctactataaagacacatgcacwcgtgtgtttattgcagcactattcacaatagcaaagacttggaaccaacccaaatgtccatcaatgggagactggattaagaaaatgtggcacatatacaccatgaaatactatgcagccataaaaaagcatgagttcatgtcctttgtagcgacagggatgaagctggaaaccatcattctgagcaaattatcacaggacacaaaaccaaacaccacatgttctcactcataggtgagaattgaacaatgagaacacttggacacagggcggggaacatcacacactggggcttgtcrtggggtgggggcttgggggagggatagcattaggagaaatacctaatgtaaatgacgagttaatgggtgcagcaaaccaacatggcacatgtatacatatgtracaaacctgcacgttgtgcacatgtactctagaacttaaagtataattaaaaaaaaaaaaaagaaaaggaaaaaaaaaagaaattctcccttggttattttttataacaactttacttctatttttgtaattattcccccctcattccttcatcattttgttttagataacattaattttagaagaatgcagctaaaataatatttttgtacctgtaaaacagatgtgtctttcaatttttcatatttttatgttccttagttggaattctatgtttcttcatataagaacatttctcactaaacattttctaagctatcttattatgtttgttaatattataaaatgaatcctttctccctttgtattcttacctgaatatttatatttatatatctattatgttctgtgtgctcattccatgattaacatttaaatttagtttttgcaaaaaytgtttaacgctcatgtgttttccaagtgtagctttttagaaggatatgatttccaagtattaatgtgtttcttctactcccaaaccaacaattcacagaactcaccacccacactgtgagaattgaatcacccctgggcaaccaaacaaaaactagaaataatgagacagaaggagcaacatacatagtttcccagttgcagtgaatagatcaacaataggctggcctgaaaagagtggttcaytgggggatgggagatgttggacatgtgagaaaggagaaggagtttatcagtacttggggttggacagacaacttctgggttttgtccatcctttcagctgttccacctaaaagaggctagtgccttatmtagatggcaaatttagaaagtaaaaatggaatgcttggctcaggtcctctctcttcctcttgagaatgagcttcccacgcatggcaggactttctctctgctctccccactcactgtttctaccctcctggtcaagcattgcctgtaaccaagtaggtatgtccacttaatcttgggttagcaaacgcgattctgctttcacactaagctgttcttgaatggaaactacagaactcagatgatattttatctttcacttgtgaatcatttaccttatatgtcagttttttagagcctaggcaaaaagtggaatctgattgggcctctcatagacctgcacaagaattcaatgttcctgagggcagagaaccagtctcgtytaatactcattctccacactacaaccattaagagtgagaactctggacccaaactaaattgattcacaatctggctacagtatttacagctctgtcatgtgggctaagttaaatgtttcaataaaccacattttaacataaaagtgtgcttgtgagaattaaattagataaccgatgataaagtttagcacagtattatatgttaagcaatcaataaaaggtagtgattattattatgaaacatgagactattgctccacagtgctatcaggcctttctcatagagttcctcttttgcctctaattgatgctgtgacattgtggtctccttggttggtcttaagctgtgccacaggagggaaaatcattccttacatgaatagaagtgttctcactctttccaaagcccttctagctagtagtgataggcagaaggcaggagtacaatcaacaaggaaagaaatcgcatcaaaagaatgctatgattatagcctaaacttctcaaaagaagacatagttggaaaatgtgttgttctaaacttatgccgcagataccataaaggtaagttgaatgtggccagaagttgaattatcagttatttttccctgcagactatggataaaacttgcatctgtggtcatcatcaataaagcacagtaacaacctttgagaagctagtgttcatgagtgacagaatgtagtgacagcatcatgtgcaacgatgtaaccagaattaataaattagggcgctacagagtcaaaacaatctaaatggcttcagtgtaaacagaatattgctccacaacgtcatcaccactgctttgtggttaataacaagtactacctctttcttgaggaagtagatatgaaatgagatagaaatggtacattggcaataaaaaacaggaagagatggttattaggcatgaacaaggatggactgttcctgttgatactatcaagaatcttcacaagctccaattaggcaacaaatgtgttacctcttttctattcattattctaaataatattcaatattctaaataatctacctcttttctattcattattctaaataataaattctaaataatctaaatcgctataccctatatggactcaagaattttctaatacagcttgaatctccacaaaaatattttttccagtgccccacacccctaggggtggccttcaatgccaacatattaagtcaaataaaaagatgtgatatgactattttcataattcttgaatatatatttggtgagttttaacacatttgcttaaaatgtagtaaaaagtcaaaagtagaagatttcattgacgaagagtttcagtcttagagctaattattgatgaaacattaggaacttaggagttagacagatctgaagtccagtttctatcacttgagtccagtttctatcacttgctggcttttggttcttaaaaatactgactattaaagcatttgttttcttatcagtaacaataagaaaggcaatcttatccatgtcatcggactgttgtgatggttaagtaaaatattgcttgcaatacacttagcaaagtgactggaagatgggaagaagtaaataaataattgcctattaaaatcaccatcacccaagctgagaaacagcttaacaatatatagtattttcataagaaaaccacacgatgtcagtgtatataattctgagtaagctgagagatgcatattcttggataacaaaactaaacattgtaaagacagaattctctccactttattttacatgtttaattctaatccaaattccaaattattttttaatgtaataaaattactctggtcttcataggaaatattgtacaggctataaaatcttagaggatttttaaaaaagtgtaatgagaaagggtttggactatcaaatatataattacatgatgctataataatcagaactgagaagtgctcccataagaatcaactgacaaataataaaacgaactcagaaacaaaagttttagcttatgaagatgtagacctagatatagatacaaagtgagcatttgaaaacaataaagatatggactactcaatacatgaaagtgagaataatttagcagacaaaataaaactgtagtgttatctctctatattatccaataactccagatgtctcaaagactaaaatctttaaaaagaaaacaataagtagttatttataagtacatgattgtgtgcaaataaaagcataaaggagaagaggtggtatattgaacacattcaatgttttgtgttaaaatattacaaagtaaatcttaaaaatcagtactttcactaacagtgcctggtgcatggtataaattcagtaataatacaagggttcagttgtagggggacattttagagagttatggtaaactcatgtaatagagattttttgtaaccattaaaatgatctttgaaatggcttttggtaattttgaaaataattataatatgatgctaaggaaaaaaactcaagagttataaaacatataaccttgattgtattagaaataaaaagataaaaataaatcaaaacttaatagcagataacttttggtgatttaatttttctgtctttatgcttttctgcatttacaatatagaatttttaaagacactgtagtcaatatatatatatatatttattaagtttataaaccagaaataggtctctgatgatgagaaacttaagatgaayagatatttttatttaaatggggagaagagagaaaacatttctttttggaaattttcaagtttaaacagctacagggttttaacatactttttctggtagactagagagaatgaaggaagttaatgttgaaaatatagttrgcatctccttactggtgagaattaaaccaataaatcacatgagtccctttgggtaatcatttaagctggcaagaataaagcatatatcattaaactttagacccccacttactttttgggtggaggttgacatacaggaaatgaagtctggagtayaagcagcataaaaaaaatgattttaatktttaagttgggataagggaatatccgtggaaaaacactaatgtagtgaagagtttcgaagagtgataacactgaaattgtcattaaatttaaccaagtccttgatgtgagaaatttcagttcattgttgacaacacagattgcagaagcatatggaagcaattagaagaaagtaaatggagactgtgggtgcaggctgcatatttgtggagcttgactagataaaaggaataatataggatgagatctaaaagaggcaatgaggagtctgatatcttctttcagagctgaggaaatctgagcatgaaagcaagccaaagaagaagacaaaattgatgattctttggtgggggtgtgggagtggggtgaatatgagaacagtatctcattatgaaggaatagcaagttctgtagcaaaggctgaggagttagatttccagataagaatatgattcctcttctgctgagattagcaggaaggaagttctgatagatgtaaaaattcttcaggagacaggcagctggggcaggggagcagtgtagggcatgcatgcaggaagcaatggatcacaacagaagattctggctctccgtgaatcagatgcatgagctgagaacatgcccagtgtttactgggcttactacccttgctgagtccgtttctgctctgatcagtgtcaggatccaatgcagtccatatgacttttcatataatatggaaaagttccatattatatgaaattccatgttatatgaaacttggaaattcccttggaaaagttgtaatgcattcttataaatacaggtgatttttaccatgaaatgaactgggaagaaagctagatgaaagtatagaaaagttaaaagcttttggagaaatacaccataaatttcagtgggatattcagggtccagaagattggaagcagcatgaccagctggtagccctgacaagagcttgttaaattcctaatgaaccccaataatcttgttgcctgattatgttttgatgagtgcttaagatgtttaagcttaaaagctcttcttggacactattttcatttaccattgggcctctaaattgaaattgtctctaaggctccccgataatggccttttagattttcagtgttgggtaatatggaaatatcttagaatctaaatgcacagtgggtccgtgggagcagaaagattctcatgcatgagaagctccataaaacatctatagcattgtcttaggttgcttggagaaactgcattcatattcataatgtattgtataattatgagatcctgattttcatatttcccagtgtgccttttcagctctgctgtataaccaaattaaaggagactacacaactttacaaaattrgagtgttctgttttgtatattgctgtttgacagtactttaattttaatttgttcatcattgatcctaataaagacaaactgtcattttaaccattgcctggaatgtaatacattagttttattgcatctataacagctgcttatgtgtctctccctctgtctttcaatgatgagttgtccttttctctaggcagtgccaggaaatctggaagagctcacaacacctctatataaactggattaaatagaggaaaatttaattgtatgttattattgtacttctactacttaatacagaaaggggatatataaaagaaaggcacttcatgcatacatgatgaataaaygaagaataaatattttacttttttaaattagctttgtatttgcctaattccttggcctcagtttcctcttccagaaattgggaatgagacactaaaccatatgagggtcaaatgagcaaactgtatttcctggagatacaaacttccttaactttgtatctctaggaaagagatgcaagtctattctatcacatacctgggaaatatttatgatgttttatatctcaaattaatgcatgtaataatcgaaaaattcattctcattattaaaaaaaattatttgccaagaaaaatgtgcttatatgtctgtacatattcacaggtatctcctatgaatctatttggacagaatctatacaggtctaagtttacgatgtaatagataacactgtgccctagcttagatgtaagacagggcaaagaaaactgaagatgtggtcaacagtaggttcttaaagtggggtgcatgattagcaatcttcctcaaagtctgtttctctcaagatttgtgtttgtcaaatgtgctgctcaaacttccttctagggggcagcagtgccctggatttttgccaatattccttcctctctctttaaacatccgtcagtgacttaggtcttcttcaaagaggcaaagtcaaaggaaatagtcgtggtaattttgttattacatgggcatactgatattagaaacagttaatattccaccaaaagtcattagaagggttgtgggagggcatatataaagaaaacrtaataacatggtacagttaagaggaaactaatatattaaaacgactgcacagaggagagaagccctcattgcaatattgaatatrtagcattcatttttactagcatattttgtgtatactttattgctagtataataaaatcaaggttactaggggtaaatgtatgtttatttrcagaataaaaatttgagacatggggttttaagtatgtgagaattaaaatctgctaagtacaagatttgcccaagaagtgtaaagattttaggagaacaggcaaatagatttaactctgacttggactttcttgaaactgctgtgatttgtcaggaatgtttattgaattaatgatttttcctttgaatggggattgtggttttacaaagcaactcaaaatattgagcagraatcagttcaaaattcttgactcatgttctagtcctctactggttgagacaccagactgtagtaaatcttgacaacagattttatacataaaattttacttcttatgtcacttggccatattcaattacagctctaattatagagaagttattaaaatgttcgcaaagttttattttacagttttgcttgatgatctcttttatcatatatgttagaccctcatcccaaactcttgaaatagtggatttagcactaggagcatgatgactcagatggctctggtcatctatcaggagaaagatggtggtccatctgttacactaaaaattaacccacgatgtcttcctttttctcacaccatcattatctgggtaggatgagaagcacttctactttacctctcatttctaattaagtcttctctttgaattaatctatcctggatttttattttaatcatatttcaaatatagtaagatcatacaagaaaaaatattgtttgcccaagcctctgaagtgttctggaatagctttgcttattgtaatattagagagaaactttgcttgattgtcatcatttttcaaaatatatggtactgacattgtgtcttttctccaayrgagaaattcttctcagagttwtatakatataacttgtaatttttgcactaagttcttactcatcactcttaattgccaaatcttagagctatgaaaaaaatacaytgccactaatcatctaatgagmtmtgatattgcttatctagaaaatattcactctttaacagcyttcttcacytarcatttggtgaaaaagtrcaataattactgargaaatgtaaatatccttcaaacattctcactgttctttttcacatttccttgtctattatttaaaaaatatgtgttattgatgccatgggagtgacacttttaagataaattcagaaatacccctgtaggatcaaccatcrgacatgaaatgtgaaatgctgtcacactggcatgaatgactgctrctataatcactggctcttcttttataggggtttttattaattaaatgtaaagtctgccattggccttataagagtgytcatctgttttcctttaatttcaagtagattaaaagtgagatttggtgttaattaaaaacttagaatttatggggtttctaattgcaaataacatttctgtggtgagtacgtagatgacttcttagttctgtttggtaatcaacatagtattgaacaaggacaggacaaaaaataaaycatttgaagaaaagaacaccatcattggctctattgtccgtgaatagcttgaatcctatctagctggggggcatgtaagaggagaagctcaacagctcaggataaacrttttaccctgatgtctggaaatttcattctttctttgaaaaatgtagatggatttggaaggatagcaataaaagtcaaaaagtcattatcaagattaatcagtttaattgaaatgcttcaacattgtttgatttcagatgtctatttttaagttgaatttaggatatatagggtaactgatgaccaagaggtctatgggagtttcacattttattatttattatcttaactagakcctgttgagaaatttttttttttaaaggacatcttctgtgggaacscgtagtacagatattttccaattagcatctttgtatgttctcttctggcatgagtcgggtttaggyttgacacactgggcttttaaggggagctctatctttgcagtccaggctacgtgtgacaagattaaattggcacactttactgtacrgctcttgtgttcctggcagcactrgcctggctgatacctctgagagaaggctcagctgtcactcactgacccattaacactactgttctatcctgcagtgtcatttttctcattcttatggagataatgctccctggagatctccaatacctggaggaatgaaagagaayagcagagacaggctaactatcaaagagggagcaaacaacacagcaagaccatgaattccaacagttgaattttcaattgagtgaaaagatgaggcctattatgatggctgggttcagaaggtggggagacgatcaagttttaagaggtatcttaactttttaacaagykattttctcttttcttcctgaatattaaaagaagtgcccaaaataacacctgcaactagatatagagaaggcagctgctttgaacatgtaatagggacatttgggtaagaatttatcatttgcaaataggcaatggatataaaacagagcatgcattaaggtgaatggcttaatattctaaataaaacaggatccctagttagggttggcttattggggcacaaaatcgccttcctggtaaaagcacaaaaagagagaaatgatatgtgatctttgtatcccttggtctaaggcttctcttctcttgtgattgaacggtttccagtggcataagcaaactctgttgctctcttgtagtccaaactgtgtattgtttggtgggtcactttataagaagtwacactttctaatggttactacataaaaaggcactataagaacatgtttctagatttcctggactaaggctggtccagtttgattgatatgaaagcaaaataaataaataaataaataaataaataccacctgaaagtctatggaaacctgctgaagacatttttatagaaaaccaaaaagaaaaaaaagaggaaataaacaaaaggaagagcaaaagtgaagtagtcagaaaatagggataaaactaggtaaaaacagagattcagaattattaaacagagtaaggaaaagtggaatgtcacaaactacaaactttttaccacaatctgcacctcaaccctctctccctgcttccaattttcccacaccaagcaaagtttattactgggtttaaaktgttatcctcaggccgaggtttgtatacattttccctccccacttcaagtgtcacaggtsstagacgccatcaggataaatgtggcatattatttgagagtactgacttttctttaaaaggggtttttgttaacgtgcgtgtgcttgttttgtttttaaagttaattaagctacaaataatttacagctttgttgttaccttaaaatacatatggcacattatggagcaggataaatattcatacctattttaaagatcaaaaacaagacattaaagaaatattggtaggaagaaatacctttggactaactctcaraactctcatgtgccttagggactgagtttgttcctttcttctatttgataygcttgtcgggaaagcttgagatacagtgctccagggtttaacagggaaaagggactcagattattgaggttcagcaatgacggcgattaggatgccctgtagtttgcccaagtcctccagaaaaggaaatcacttttagtcttcattttacagctggcaggcactgtacaaatcagtcagctcaggctgcgtggcccatgtcccagtgctgtgcaggacctgcctctatcacccgtgtgcactgcccggatggtgccaagcgcattggagcaccggaaggagacgcggagccgaggccaggccttccggcggtcgttacgggacgccgctgccatctacagcactccgtgaagaatatgctggccgccttcatctcccgcgtgttgaggcgagttgcccagaaatcagctcgcagagtgctggtggcatcccgtaactcctcaaatgacgctacatttgaaattaagaaatgtgatctttatctgttggaagagggtccccctgtcactacagtgctcactagggcggaggggcttaaatactacaggatgatgctgactgttcgccgcatggaattgaaggcagatcagctgtacaaacagaaattcattcgcggtttctgtcacctgtgcgatggtcaggaagcttgttgcgtgggccttgaggccggcataaacccctcggatcacgtcattacatcctatagggctcatggtgtgtgctatactcggggactttctgtccgatccattctcgcagagctgacgggaagaagaggaggttgtgctaaaggaaaaggaggatcgatgcatatgtataccaagaacttctatgggggcaatggcatcgtcggtgcacagggccccctgggcgctggcattgctctggcctgtaaatayaaaggaaacgatgagatctgtttgactttatatggggatggcgctgcgaatcaggggcagatagccgaagctttcaatatggcagctttatggaaattaccttgtgttttcatctgtgagaataacctatatggaatgggaacatctactgagagagcagcagccagccctgattactacaagaggggcaattttatccctgggctaaaggtcgatggaatggatgttctgtgtgttcgtgaggcaacaaaatttgcagctaactactgtagatctggaaaggggcccatactgatggagctgcaaacctaccgttatcatggacacagtatgagtgatcctggagtcagttatcgtacacgagaagaaattcaggaagtaaraagtaagagggatcctataataattctccaagatagaatggtaaacagcaagctcgccactgtggaagaattaaaggaaattggggctgaggtgaggaaagaaattgatgatgctgcccagtttgctaccactgatcctgagycacatttggaagaattaggccatcacatctacagcagtgattcatcttttgaagttcgtggtgcaaatccatggatcaagtttaagtccgtcagttaaagggaggctacgtgtgaatttatcatcagtctctcaatggaatgttcatggtcaaatttaagaaactgtgttctcaactcaaggaggaataaaactcataaaacaaaagccttgtaagcatttattaaaagagattattaaaagagattgaaagacatgcgttcaataaaagtgatattatattcaattatactgtatatttttgcattaaaagatactatataggtaataatttagtgtgaatatcttaaagattattttgaacttatacaagtctaaaataggaaaaggagattatttaacttcccaaactgtttgtcataacagttccatttgatttagctttatactattttaatgcattctcttctttaaaagaaagttgtttcctgcttcccctgccatgggtttctatgtagaatcaccatcctgaggtaaggagattatttcaagctactcaggacacctatggatatgtaaccatttacttgaattacctaataacgaatacagtttagtgtaacagtgtgcgcatgcgcacacccacacacgtggtgctgaagtttgttaacactgaccgtttttccaataatatatgatatttaacagggcaggggaggaagaacaaggatttttttttttcatattattgtatcttgttacaatatttttagtcttttaacccttaaggaaaaatatagcaaaaattaaaatctaggggaaaaactgcattccgctttaatctttaagttaaagctactcttattttgcagttcatttatgcccttatatattctaaaatttaatgggccattctggtgaatttcagactgaaaaatgaataaacagagatggtgattcaaagagttaagcagaggaggtgacattaataaaaagttgaaagtaaaatctaccttgcttcttactagctgttaaccatgcgttactaatcactacatgatcaactatttagtatcttttaatgcaacagaacattcacagataactttttccaaaggaacacacaacatgtcttttctgcagtccagcaccatgtcaattatcaagtcatgatttggtgaaagcagttttacatggttatattcgactacttaaaatcctgctgagcttggtgtttggtgtatgttatttttctgagagcagagatgataatttgcctgtgatttaagaatagtaggtggaacataccaaaacagtcaaaggttaaccctttttctttactgtacagcatctacttctacaaatagaacctagattctaagaaataagaaaaccaaaagctcagaggcctgggagaagatgaacatatgtacatatatatacaggcttaatctccgtatcttctcccaaacaagtttaaacaggtaagataacctaacattccgaattcggaaagcaaagataaacattgttttgcttatatgtaagtgatattactagctaacatgttttgattagaacaccgcagttgttcagaggtgcttggattggattcctacaattaaaaacaaaaaaggatttttcatacgacattcagaataataagtacatccttctaatgataaagaattctttttatttttacatactgatattttcacatatttgcaagtggaagataagctgctcaattaaggctattttacatatgcaatatacagaaataatttttaaagtttttcaatagattcttttgatgacagcaaaaattaagatacaaataattgattagaaatgaaaccatccctaaatcaagatacatagatattgtacttcacttcagggaaataatccaaattttgttgttagaggaataaagcatgtttgtcacaacacaatatatgttatcaaattccattaaagaaggaggttttcaatgttttctatattaaacaatgttcagatttcttgcatacattgagtaattataatcatatcactggttacgcacaattctgtaatcatgcaaaacaaaaaaaagcaaccgaaaaattcaaacatgttgttttcaattaggtcaagatttattgcttgactaatgatagcaataatttatcaagctgtaaacaagagaggtgtagaaatctagcaattggattctatttcttgtctatagtactgggttactcaatctgttttatcctcacgttaaaatacctactaagttatgatagtcataataagaatttcactgctgcagcaaagctagactatctgcgaaaaggaagagttcctaatttcttaatctttatgatatgttataatgataaaatatcatgtagtgtgtgtggaatgtaataagaaagaaaggagcttaaagatttataaagggtatactagattagaattacattttttaaaaaaaaatggacatgtcttcccatctagtgtacaaaaaccagagcatatggttacaaaaatttaacttgaaattttgtaagagctatgttttaaaaattgaaacataattttataattgaaatataatttttacatatgcaatatacagaaataatttttaaagtttcacccttctaaaagtgcacaagtcaatgattttagtacatacacaagactatgcaatcaccactgtctaattctagaatatttttataattcccattttcagtcaatcctatttcccctggcaactactaatctactttttgtctctagatttgcctattctggacatttcatataagccacacaatatgttggtcctatatgactggctgctatcccttagcttaatgttttcatgtttcgtccatgctgtagcatgtatcagtactttagtctttttatggctgaataacatttccattttatttatccacaagttattgaagatttagaattttttttctactttttgactattatgaataaagtgttgctgagaaaaaattcaatcacaaagacaataacaattttcaatgtattggctaatgcaaacaatatcccttacgatgcaatcccttttgattataaacaaataatgatgaagaaaagtgttaaaatactttaagcctgatatttatcaacttacataatctattgctccagttggatttagaattacaattttagatttgcataaaatttgagaacagtatgcagatgtaccacatgccctgcacccaatttcccttttattaacattttatattagtttgtggcaaggaaagagtaaattcagcaggcttgagttactcaaagcctgcacatttaaggaaagacctcttttcacactcctgggagataatctctgaacaccttggaatattctacctgatatgaatgtttttgtgagcctcaggccttgggccatactatgccaatatgaccagattagcttatcttaatgatgtgtccctcttttactccattgagaagatatacctggaaacttctgcctgctttctcttgaacttctcttcatgtgtctttttcctttcctaattttaatttgtatcctttcactgtaataaaccataagaaaaaacaatccagtttttttaattatacagaataagaagctatatataaaagaggaggtccagagatattaagtggctaattcaggttcacatagtaagtgatagtgatagctattgttatcagtccattctcatgctgctataaggacatacccgagactgggtaatttataaaggaaagtttagttgactcagagttcagcatggctgaggaggccttgggaaacttaacaatcatggcggaaggggaagcaaacacatccttcttcacaaggtggcaagaaaaagaatgggagcagagtgaagggggaagccccttataaaaccatcagatctcctgagaacttacttactatcatgagaatagcatgggggaagccacccccatgattcaattactttccaccaggtccatcccatgacatatggggattatgggaactactactgaagatgagatttgggtggggacacagccaaaccatatcagctactaatcatagccactattctattttactagactgcttttgtgtacaagacactatgcttagtattttgtatacattgtcccacttgatgtttacaatatccacataatataggcattataatctacattttacgaaagaggaaattgaggcacaagtaagttgcttaagattttgcagtttacaaatggaggatgcaggattaaaagccaggcaacaaaatccatattttgaaaattacttttttgtactgctttgtacagtaataaccaaccacaaaatctgttctaaaaaggttcattaataaatgaatgaatacaattaaactagaactaagggattttatcaattactatgaactgagtctagattgcaggcctagagtagaaacacatagaccaagattgggaggaaaacagacacaggatataggaagtaaggcagagtaaatatagccacaaaagttgtgatattcatcccattaagaaattggatatatgtcccttcctcttgaatctgagtgagcttatgccactctgaacaacagacaccagcagaaatgacactgaaatgcagtttcagggcccaggatatgagaaacaggcagcttttgcttcatatctcttgggaacattctctctaggagctgtgattctccactttagaagttcaaatacactgagaacctcttgctagcgagggcatgagcagacactctgatcaccagtcctggctgatctctgccttgcagccaaagctacaaaggcaacagactctcagtgaggctatcctagaccttccagacagcccatctactagctgaaagctaacgagggatgtctggcaaaacagtacaatcgaaaccaaactctccccagattcccaatgtacaaaatcacaaggaaaaataaaaatggttgtttttaatattctaatttttgaagtactttgtagcgatagatagccagaataaaaagggagttttgactcagcagaaattagaattacattgcttattcaaagccagggatctcgggagaataggtgaagtttagtaaaccaagtcagaatcagaaagcccaaaggatattccactgcataggttcataatttagaagtaccaagggagaagagatgggaatccagtaaaaagagggcagcccagggaaaaaaatgacaactgttaaacatataattttacaccatgtggggctggtttccagattaactagaatacctacaacatgcgttttgaggtttttagagtaaaatgttgccaaccataggtttggaaacacattgcagattatatttgcaatttcagcaacttagatttggctgagtccaggcagaagttttctgattaatgagtattaggccttaatgggtcaactccagcacttgaaatgccaaggaagtgtatgaacacttcgttggatgtgcacagctctttgtgactattctagctaagtagtaaagaggaatccaggtagccaagggctcgagaatatagaacctgagaagcaaagagggaatgaagtcaggaacccagccaagttaatagccattagacaaagaaacagaagactaaatcggagggtaggggaaagagcggacttgaataatgaacaagggtaagggaactagaattaggagttggcatttggtgagctttgtgctatcacaggagtcaatacctactagatggattgaatcagtggtatctcatgtcttgactgactctttagaacctaatgcttcctatccagtttcactaagtcttaaagcaacccttccttcatgtggcgtggaaataaattagagtctgaactttggtgtcattcaaatctgggttcaaatcacagccctgtcatctatgagaaatggtatctttggaaaatgaactaattctgtgtatctttgctttttcatctgtaagaagtttaacccatatgactgttgtaaaagttaaatgaagaactaaagtgacatctagtccaggcatacccaacgtgatcaatttctgtccataggaagagagagcttttcacttagaaaaagaagagcattcagaagagactatcccatgtcat

SEQ ID NO: 93497 - DNA, 26945 bp, Homo sapiens
cctgggctcaaggggtcctcctacctcagccgcccgagtagctgaaactacaaacgcatgccaccatgctcagctaattttgtttattttttgtagagacgagggctcactgtgttgctcaggctggtctcgaactcctggactcatacaatcctcccacctcatcctcccaaaagcttggattacaggtgtgagacactgcacctggcttaggagtatttttatgcctacttttggcagattaaggatggccccaaattctttttcactccttctatcacagactctgtgactgcttgacccataaaatatggcaaaagtgataccatgacactttctggcacagccctaaagagactggcagcttcctcttcttatgttggagcccttactttttttttttttttgagagggagtctcgttttgtcatccaggcaggagagcagtggcactatcttggctcactgcaacctctgactcgtgggttcaagcgattcttctgcctcagcttcccgagtagctgggcctacaggcgagcgccactacacccagctaatttttcatatttttagtagagacggggtttcaccatattggccaggctggtctcgaactcctgacctcatgatccgaccacctcggcctcccaaagtgctggggttacaggcatgagccaccgcacctggccaaggagcccttactctctgagccctgagccaccatgttagaagtgcaggcaccctatgggagagttcacatggagaggacctgggaccaggtggagaactctatataagaatgaagttatcttggtttgggaggctgagtcaggaaggatcgcttgaggccaggagttccagacaaacctgtgcaacatagcaagaccttgtctcaaagaaaagtgaagtcatcttggttcctccagcccagcctagcaccagccaaatagtaccaagtgacccaattgatgctgcatagtgcagaagaatcacccagtcaagcttcattcctgatccacaaaaccatgaaacagaataaaatggttgttgttttcagccacaacattttggggaggttttttacacagccataaccaaaatattacttaatggctgaagacgtgaaggcttagagagattctatcttacccaaagcaacacccctggtatacaaagacactgaggctgggcacagtggctcacgtctgtaatcccaacactttgagaggccgaggcgggagaatcacttgaggccagaagtttgagaccagtctgggcaacatagcaagaccgcatctctacaaaaaatgttaaaaattagccagggatggtggtgcatgcctgtagtcttacttacttgggaggctgaggcaggagggtcacttgagcccaggagtttgaggctgcagtgagctataatcacaccattgtactccagcctgggcaatggagcaagattccagctctatggaaaaaaaaaaaaaaaaaagaaagaaagaaaagaaagacactgaactgtgaacctaggtctgtctgccccagaatccgttcctttaaccactgtgctttactgaggatgagtcagaacttgtaatgatgattccgatttcaatattttgctatttctcccacaatgagtgggagaaaataatggtccaggaaacccacatgactacagggagctgccctgcctccttacagtggcctgccaaggccgccagcaatgcttctcattccacaagtaatcccccagactgatcttggcaactggctgtcctctcagcctagcccttttgttcttaggaaaacaggagcccagagaggaggtgccatcggactggatttttctttatcttttttttttttttcctgttacaggatttcagtctgtcacccaggctggagtgcagtggtgtgatcatagctcactgcagtctcaaattcccaggctctgctgatcctcccacctcagccccctgagtagctgggaccacaggagtgcactaccacgcccagcttattttttgtagagacaagagttttgccatgctgcccaggctggtctcaaactcctgggctcaagcaatctgcccacgtaggcctctcaaagtgctgggactggctgggtgcgatggctcacgcctgttatcttatcactttgggaggtcgaggtgggaggatctttagaggcaaggagttcaagaccatcctggccaacatggcgaaaccctgtctctacttaaaaatacaaaaattggctgggtgtggtagtgcaggcctgtaatcccacctactcaggtggctgaggcaagacaatcccttgaacccgggaggcggaggttgcagtgaaccgagattgtgccactgtactccagcctgggcgacagagcaagcctgcctaaaaaaaaaaaaaaaaaaaaaaaaagtgctaggttacaagcaaaacctaccatgcttggcttttttttcttctaaaaaaaaaaaaccccagaatatatatatatatatatatatatatatatatatatatatatgtatgtatatttcaagagtccagaaatcctcacaactccatatgccactcccaccccccggaacaggccagcatccacatcacaactggacagctccccagaataaaaaatggctgacataaccgagaaaaatgtactatctgagtatgtaaaggcttgatataaatatataagatcagcccccagatttctcttgataagatgtcagaggagatgaacagtttacgtacaaggaaaagcagacaataaatcctcacatggaagtgtgcccagtctcactagcaatgaaagaaatgggaattaaataacttcaaggtactattatgtgcctattaaattagcaaaaataaataaaaatgacaatctcttatgttgtcagtgctgtggggacagagatagaggagggtggcaatttgggttgtcaggatctcctggaggtggctgaggcaatacacagcaatccgggtaaaacagctcaaaccttctgacctagaaattcaacctggggaaccatatcccaaggggagacaaaggtatgaagatattgatatctgtgcttttacaatataaaaaaatgggaaataactcaaccacaaggaatggctgaacaagctctggctcgctggcacaatggaatactacgtagctattccaaataacaagctggactctgctatgcagaaatgtgtgtatgagataaccctgagaaaggcaagcagaacacaaacagacacacacacacacactgcaaccaagtgttctgtgtacgtgcgatcaaaaatcgaaagagaacttggtggagtaattgagcttcatgctcattagttgccacattctataaaaaccacacatccattcacaatttgtaaaagaaggagcaagcccccggggaagcagatgcttcaaatctccctggcccctggttccagggcctggggaatttcactctttgttctaatctcagttcttcctgctgccctcgatatttcttattgttcagtcctccagggaagctacaaagcgtctctgtatcccatacccccacccccactttgtttaatacaatatcccttcagagataaaatgacaattccatttccccatccctacttcacaaggctgccctggattcctggactcaagcattctgcttctcattaacaatttcaaacagctcctccgaaagcagacactggccatggcccaaccttgaaatgaaaagcgaatcgacttctgaaggcttccccttctctcagggttgcccgtccttgcggctgtcctgacagggacaggcagagagacgctatccactcaaattccattttaacacccattctggatcggaagactattaaagggagagccagcagccttacaccttgctgcttgtgtgtgtcagcaatcgcttctcgtgtcctggggcagagacgctgaggatatgaggctgagctgctcatctgatggcttgattgacactttgcagacgggggtgggagagctgagccagggaagcggcaagctgtacagatcagaaataatgagaggacccgaatccggagagagcaaggaataaatgagagacctaggagttggatggcgagggaaacgcttctgttctcttttccctgctctgctttgccaaggagcctggggcaaggaggcaggcaggcagaccaggaagggctccctggacccatcctgccagctgctggggcatctggggcatccaaatgtgcagaggatgccagcgtgagaaaacagagagcggcagagcaggctttgtgcgtggtctctatacacatcgctggcccagttcgagtctcaggtttaatctcttctctgccatcctccctccctttgcccccggggtcacctacccaccatctcttacctaaattattgcattaacctcaaaacatttctccccgccccatcctagcccctcttaatctatcctccgcatccctgccagagtcatctctctaaacagcaaatctgaactggtcactccctgctgaaaattatttaatagctgcctatttcctattaggataaaatctaaattctttagcttggcacacaaggcggttcacactctggcctctacctgctcttgcagcttcgtctcaggtcccttctcactgtgtcctttatgcccgggcaacgctgagcctagagaggttttagcattcggtgtgattcttccaaattccccgacacccccaagcccccttagacagtctctctcctatactcccttcccaccctgcgcatctcaataacactgagcatattgcattgtaattgtttgcatgcctgccttcccccaagctctttaaggagaaaaagccttmttttcattgtcatttttttgtaggtaatacatacatatagaacaacatagtgtacgaaagagaccactgtggaaaggacgtctgtttccaccctatcctcagctgcttagttctcctcatcagatgcaagcaacgctgttgctattttcttttgtgtccttccagagatgttcatgggtagacaaacatatacagtatattctcttttattcatctcaaaagtagggtacaagaacaccctggtgttttcattttctttatcttggcaatccacatcagtcataccgagtgggcaccttctccctgacggctgcatagtattccatggtgtgtaggagacatttgggaataagaaggcaccccctcctgtttactgataggtagtgagtttctctggctctcataggtgccctcgagtcacaaagctctctagctgtctgctattgggtgttcagggagggcgagatgcctgttctgggctggcccagcaaggtttatcaaaggctgacagcgccctctgtgagtgcccaggacagcacccaccttcagaccaggaggtggaggggattgaacacccagagaccctggtttctgcttcctttgtatttgttaaatgacatatattagagtcaatgcttctccctcaagatacaagagtacagttgctaggcagactccaggggagggcagaaaataagaaaagtcttgggaactaagaccataacctcgagaaaatacaaagtcatgatttagcctggaagtgaggggcaggcaggataaactcgtgaatgagcaccctcagacctcactgggacaaaaggaaatgcactgagacaaaaggaaaaggagggtggagtggctttcatctgtctccaggcgaaacttcccagcaggtaaacaatggaatcttcttagccttatttccaggtctttctctgtcaatcctacataaagacatgtccatatttgcacacttatctgactgtggtgccccaaaatatccccaggtattcattaagtggtgtcttcatacacatgtacatccgagtgtgtatatttctacccctaggcttttggagaaggccccattaaagctcagcaggcagtgggaaaaatgagaaatcagagtgctcagaagtggtcctgtttctctgtggaggtgagggtgtgtctgggatggagacgaggtatgtgtcccctgttggcagctttccctcccttctctgcagagatgcatttccatgtctttcttgtgcctcacagcctggatatcactataccctaaagtggggagttggggaaagagtggaaattgggagcaggaaaagtaaacagcttttgcatgagctggattggcttgataggtaacagggcaacaaaaattcagcagcatgcaggaagattaactccagcattgggccctctagtagtctcctttctgggtagatgtggtcttcccctcctagctctgcagccagacctgctgatttcgctgtttattagggaacatagacagatatgcaaactcaggtcttccccacactatcccgccagccatagggtcatggaggcagagaatccaagggaagcctgagaaaaaggaggaaaggaaagcagaattctggataacaacttctaagccttcttcagtgcccaccttctgcttgttgcctccagactggcccctaagccagtctggcccatctctcggccacgaygcctgcagacacatctttcttactcttttttctcactgtttcttattctgttcttttttctgtttctgccttgggtccccttccttcctttgaagtcaagagagaaagagaggtttaaggtaaagcctagcgtggtattgtggcatgcatcagtagtcccagctactctggaggccgagattggaggatcacttaagcccaggagtttgagtccagcctgggaaacatagcaagaccttgtctctaaaaaaaggaagaagaagaagaagaagaagaagaagaagaaggagaaagagaaggaggagaaggaggagaagaaggagaagaaagaaggaaagagagagagagagtaagaacataactaaataaaaataagggaagaccttcatggatggataataggaaaccaggacctagctagggaagaggccttgaggcagtggaaaagggagaaaggcctagaagagccagggaatctttggtgccaaagccagaaggctttgcttcttgttgagaagcctagagctttttcttctcactggggtttttatgggaagtttaagcatgctagagctgggaaggctcagctgtacccctccctcctctctcacctggctgctggtttagacaggactgtcatgtttggaatttcacacctcttgaatctgtagactggtgtctttcatgtgctttggaaaactcagccattatctcttcaaatacgttcctctgccctattcattcttccccctctttctgcaaaatacatacaatagatctctgcatgctgtatctcttatcttctctattctcccctcttttttttttaatctctatgctgtgttccaggtaatttctccttattatcttctactttgctaactctctgttccactgcatctaagctgtttttaaattaatgagttgagttttaattgctgttactatatctttagtccattttgttaccttgcataatttcctgtccctgcaaatattttcaagcttgtcttttatttatttgactgcagtaagcatgattgtattatagtctacgtatgatcattttaatgtgtgaagtcctcacgaattttttattttgtctcttgtttctctgagtctcactcatggagccttattttcttataggcttggctgtctttaacartattctggtagctgtgcttgaacaaatatattggaattattttcttatgaaagtgccttcttttacaccacattgtgtttatttctgccaggcatcagcggcacaaccatctaaacccagttgccagcctgaggttccctggagtacccaggcaatgtgaatggggctagcttactttggtttacccttaccctgatggtgtagccctttgggggtctcagcatattgaggggagaatcttctactacagtctccacaatgagcaggcactgggcttggatttccaacccccttactctaccagaccatcaaaatgaaagttcagatttgcaagaattgacagatgctctttaacggaaaagtgatttctatgcatcctctagttttctcttccatgttggcctgttaattccttactattttattaactcttcaaggcttttaagatgttgttgatattttatctagcatttttcattctttttactgggataatcggtccaaataactcagcctgtcattgccaagcttctgaacttggttgcaatcagagtactagctcctagaatatctaagctctgcagtatcttctgcatgtgtactggtctctcatttccttcatgccttcctccccagatgcctagggtgaaaaaagacagtggcaattgtcaacaaggatgaccacctacctcctagggagcaagagtgagaatctcttgatagccactcttagagctagatttaggcgtggaccagccaggctttgtctgaggggccaatatacatggaaccctaaagcgtcatcatgaattggaataccttagaagagcatcttgctgtctagaatgttttttagggaatcactatatttgttttaaagaaggaatattttgataaggtgcaggtgcaggctgtgacctcccaaggttaattgctttccactaagagtgggtcctgcttacagcttttgtttcaatgaatgggcagcaattgcccaccagcactgaattgctcagatccacagacaggcatggtcctctgttcatccttcctttttgtggtgcctaacctctataaataaagtgttgaacaaatatttatagaaaataaattttctgtctatgaggatagtaagaaactggcaacactagttgcctctggggagtgaagctgggtggaatcttgctacgtataggaaatgacttaggagaaaatactgtacagatcattgcagtcctgatgggagtcagggaagggctctaggcattgccagcatcctgtctgccccttggctcccaaccacagcctgggtaggagtgaaatccacagaaacgccagaaagcaggtgaagggttgtgtgcagcatctggaaaatttagagaatgtaaaggaagtgggattgctgggcccatgctgggtctcatctcactaagcaaggttctcatacagaaccttgaaaggacccctgcagagctctcagcagcgcggtattatattaaccaactgcgacccacttcccacctcatccttggcagcccccttttccaagtggaatcttagctttattctttctctcactttctctctctcagtctctcacctctcaggcttgcccacatttattttcttgctgtttagaaggacagaggaagaaaggtttagagaagacattgggacgattccagttgtgtttggaacagaccaccagggatcctagcccagaatttttaaagggatagagaaagaggaggttcctggaatagtccggggaaggtctgcccagagcccgttcaaagctctccagatgccctggggtgctggataactctgctcctcaccattgctccttcataaccacccgccaggttgcctaagcttgtcgcaggtttcagggcactcactcacagacatctcatttgatcttcacagcagcctcgtgaagtggacaggcaggcatttttactcccattttgcagatgaggcaactgatcactaaaaagcaacagagtcagcattcccacccctcaccccaaacctttctccaaatcaagagtgaggcagatgttcgcactcctcagcaccctgggtcttgggtcctgctaagttcttttgtgaagatagggaaagaatgtggctcattccacgttgcaaataacattccccacccccacccatgcctgcaaagaaagagaaggagcccccagtgagaagaaattctaaagcagcccctagggacctctggagaagctgtttgattttttccagtccctactggtactctgtgccacatttataaacgtcagcgctgaaaatgaagttcccactgccctggcagctgccggttgctgctgttgctcaccaaaggttcagataaagtgtccccctccccttgattgatagggagccgaaaataaaagaaaaataaaagccccctggagcattgatggaagggaggaggcagcttcttaagaagagaaagggtgtgatccagaaagggctggtaccagtggaaggcgggaaagtgagaccgacagagtgagaccccacctcaaaagaaaaaaagaaaaggaaaggggaaaagaagagaataaatacttctgcttatgcagaaaggtggcgaaattcatatttcatttcaggggctctgccacaagaagagggaaggaaaggagcttggtgaggaagtctttgtgacctctgggcttctatgctcctgagcaggatctgctatcttctggagtctgggacagagatgaggctggcagagacttagaacaaaggaggtcgggcatgacggctcattcctgtaatcctagcactttgggaggctgaggtgggtggatcacttgaggtcaggagtttgaaaccagcctggccaacatggtgaaaccctgtttctactaaaaatacaaaaaaattagcgaggcatggtggtgagcgcctgtaatcccagctactcgggaggctgaagcaggagaattgcttgaacccagagggtggaggtttcagcgagccaagatcgtgacattgccttccagcctgggcaacagagtgagactctgtctcaaaaaaaaaaaaaagaaagaaagaaagagaaaaaaacaggccaagtgcggtggctcacacctgtaatcccaacactttagggggaggccgagatgggcggatcacctgaggtcaggagttcaagaccagcctggccaacatggtgaaaccccgtctctactaaaaatacaaaaattagccaggcatggtggcaggcacctgtaatcccacctagtcgggaggctaacacaggagaatcacttgaacccgggaggccgtggttgaggcaggagaattgcttgaacctgggatgcagaggttgcagtgagctgagatggcaccattgcactccagcctaggcgacaagagcaaaactatgtctaaaaaaaaaaaagaaaacgggtcctagaggagactggaaagaaatgaaacgtaaaaggatcccaatggaccatgcagatacaaagtaatatcatcataaaccgaaccaatgaaccagtggttgagactggggagaccctgctgggagcagcttgcagcactccaggtagccacgtgcacacttttccaataatggcttcccttgcacctcccctacatctgcgatgctctcggatctttgagaagtgctgattgagaccaactcatgcagccctggctgagcacccaagggatgcagcggttaaccaggggtggcctaagtggtttcaaagcaacaagtcattgaaaagttgtttttaacttgattattgtacctttattttaaaacataccagaccacatatttccaaatgactatggttctcttcaaagtctcccccgtatgaagttgagtagttaatccagtggtactcaatgtgtggcccaagtcatcctggagctgatgtgtgaaataccttcaggccaatttataacccaggcaataaaatgtcttgctgctttataggggtttccttgctctcctttaacttgatttatcagacctgtttccccgtaacttttggcccttaccaaatgccaaatgctctgccaagctgctttcttggagaggtttggagcagccctgggaggacaggattgttcggggatgggatggaggtataattattagcaaaagagaaatgagagaaccattgtattaatgggaatctggtgggttttctctgcttttcactttccttatgtgaaaatgtttctgtttttggccgggcacggtgggtcacgcctgtaatcccagcactttgggaggccgaggcgggcggatcacaaggtcaggagattgagaccatcctggctaacacggtgaaaccccgtctgtactaaaaatacaaaaattagccaggcgtggtggcgtgtgcctgtagtcccagctgctgaggaggctgagacaggagaatggcgtgaacccgggaggcggagcttgcgctgagctgagatcgcgccactgcactccagcctgggcgacagagcgagaccccgtctcaaaaaaaagaaaagaaaatgtttctgttttgaaaaacgatgaaataaacaaaatgtgacatattcatacaatgaaatattatttggccttaaaaaaaaaatggtgacccagcctaggcaacacggcaaaatctcatctctacaaaaaatgaaaaaattagcgggtgtggtagcctgtagtcccagctactcgggaggctgaggtaggaggatcgcttgagcccaggaggtcgaggctgcagtgagctgtgatcacaccactgcactccagcctgggtgacagaacgagatcctgtgtcaaaaaaaaaaraaagaaagaaagaaagaaagatagagaagaaaagaagaagaaagaaatggcattctgacacatactacaacacaggtgaacctggaggatattatgttaagtgaaacagggcacacacaaaacgagaaatattatgattctccttatatgaggtacctaaaatagacatagacaaattcatagacaaaaagtagacattggttaccaagggctggcaatagagggaatgggagttagtgtataatggggagagatctccattttgggaagatgaaaaagttctggagatggatggcagtgatggctgtgtgaatgtgctcaatgccactgaactgtacccttaaaatggttaaattgcaaattgtaaatgttatgtgtattatacacagtaaaaaaaaaaaagtctacctaacaaaataaaatctactcaaaaggtaaagatttggctggggatagtggctcatgcctgcaatcccagcactttgggaggccatggcccagtagttcaagaccagcctgggcaacacggtgaaactctgtctctacaaaaaaatagaaaaattagctgggtgtgttggtgcacacctgtagctacttgggaggctgaggcaggaggatcacttgagccagggtggttaaggctgcagtgagccaagatcccaccactgcactccagcctgggtgacagaatgagagaccctatctcaaaacaaaagggagataaatattttatatcactgatgttattcataaaaatttgctatgggacagagtgggccaaagtccaaagaaaaagacccaaaatattccttcctcaggaacaaaaattagccaggatcagctgggttaaatacaggtgtctgtcactcctgctctaaaatagctctgggaagggacccctccttcagttcttctcccataatatcttgaacctatctgtgccctggaacattccacagcacagcctgggtttccctgacccgggacccgctggggctggcccactcccctggcagtgtgaacaaggctctggcgagtcatggttctgctggccaggaggctgctgaggtggctttttaatcctccagccatgccgtcctagtgattgcttttattaggaaatgtaatgaaaaagactatatgaagcccctgccagaaaaaaaaaaaaaaatctaataagattttgcaccaagtgtggcgagaaaagaaaggggggaaaaagcacattaggagtcagataatgagataaatgaaagaccgcagggaagatcatttttgcagacttgctggatggttgtaaaatttttaatttgctgaattctcttttttcgttgtctctgactcttctcaactcttgtcttttactgtctttctgatggctgaacgctttctctctttgcctctccccttttccttgatttttctgcctgtttcagctcttgccttggatatgtgtgtgtgtgtgtgtgtgtgtgtgtgtgtgtgtgtgtgtctcctttccccatccatggccaaatcctgcctcatgacttgggtaggaggctgagatctggacagcgaggacccacctagttaagggaaaaagaggacaaagaactgcctctcccagcctttgccttctagggagtggctatgattcagctaaagaaagaaaaagaggaataaatcaagggaaggagggggaaaawggactatggagggaggacaggagatcaaagaccaaggaagtaaggaggaagagaaagcccccgctgcttccgcaaatcaattcctggcaatgcctgcctcttcgtctgtgctctaagctcctgagcagaatgccacctctgtgggatgccaggcctgaacagaagggctctggggcactgggcaggcatgcaggccaggctgcagggaccccaggcctgccttgccctgaagagagaggtctcccttccccaggaccaccctctcaccatccacacttgaagtcctctccaaaatctagtttcaccgcttgctttggcagactccttcctcctgttccaaacttgggaattctgaggtgtctcttggctgctgcgcataagtcccagttcacagctgcaacttgggggactgagggtggacacaatgagcagcttccccacagggagtcagcagaggaaggaggctgggaaactgaagtataggaatgagtgacttaggatggagacgcactgctagttattaggaacatccctctcactcctcggtcccttgttccttccccagtggggactatccactctgtttccctcccagagatgtcatctctcttggtgctctcccacatgcgaaagtgtgctgctggttactgagggaatgggcgtttcctgtactggccattacaggagataaaagagccacccaaatcagtgaagtccatgggaatgagaggacctactagaaaccacacactctgtaccctttgatcaacagttcctctctctccaaccccctccctgagcctgtggtgaccatcattttttttttttgagtttcgctcttgtcacccaggctggagtacagcggtgcaatcttggctcactgcaacgtcagcctcttgggttcaagtgattctcctgtctccgcctcccaagtagctgggattacaggcgcctaccaccatgcccggctaattttttgtattttttagtagagatggggcttctccatgttggtcaggctggtctcaaactcctgacctcaggtgatccgcccgcctcagcctcccagagtgctgggattacaggcatgagccaccgcgcccagccaccattattccactctctacttccatgactttaacttttttggatttcacatataagtgagatcatgtgatggatttgttaattagcctgacttaatcattccacattgtaaacatatattgaaacatcaggccgggcacagtggctcatgtctgtaaccccaaaactttgggaggctgagaagagaggaccgcttgaggccaggagtttgagaccagtctgagcaacaaagcaagacccccatctctacaaaaaataaaacaaaataaaattagccaggcacggtgcggcatgcctgtggtcccagctactcaggaggctaaggcgggaggactgctaggagttcgagactgctgggaactataatcgcaccactgcactccagcctgggtgacagtgggaccctgtctctaaaataaaaataaaataaaagtatcacaatgtaccccataaatatatatacaattattatttgtcaattaaaaataaaattttaatctgggcacagtggcacatgcatatagtcccaacttctcaggggctgaggtgggaagatcacttgatcccaggagttcaaatctagcctaagcaatgcagcaagaccccatctcttaaaaagcaaacaaaccaaccaatactttttttttttaatttagaaaaaagaagaactcaggcaaaagacctggtggaatctgatatgcatcaacggtactctggggggtctcagggaagcttccacgaatgagggttatgtggcggggtctgatggtggcgccccaagccaggctgggcaggggaggaagagggctaggaaataaggtggactggaacagagatggtcgtcccaagaggggagatgaaataggttcaaggccagctgggaggggtggctgctaccagactgtggaatagaaataggctgggaataagagctcatacacacgtagaccagctcattgaagtgggaaaaatacaaatgagctaatacacacagtgcatcctatgctccaggaattgctctgagaaccggagtatatttacttatttaatctcaccacaatcctatggagtcggtactattgttaacacctccattttacacacgaggaaagtgaggcttggtgagaggattcagaacacagccgccttcctccagagtctgtgctcgtaaccaccctcctccagaataggagcctaggtaggcaaagtcatgaagactcagggagggggagaatggcactgcacttaagaacgtgaacttctggacccggtagcctgactcttaccctcggtctgaccttggataggatccttagcactaaggtcggcctgcagagagacacgaagagtgactggaagcatgttggtaaaaacacaggcacagtgctgtccctgagctcagtcaggggaagttttttttttgttttttttgagatggagtctccctctgttgcccaggctagagtgcagtggcatgatctcggctcactgcaagctccacttcttgggttcacgccattctcctgcctcagcctcccaagtagctgggactacaggcgcctgccaccacgcctggctaattttttgtattttgtttagtagagatggggtttcaccgtgttagccaggatggtctcratctcctgacctcgtgatccgcacctctcagcctcccaaagtgctgggattacaggcatgagccaccgcacccggccagggggccagtttttaacactgttactctctgcttcccatgagatgaaggaagcatctttggtgcttggcaactggcaaggctcaaggctcaatttcccacctctgatttcccaccagaaacacaggagatggaccctccaagggactgacttcttaggggcacacagtcctgcaaacaggtcccagcacacatagcacagcccctctccccagagccaaccaccccttgctgtgtcctgatgaccccccagtgttcccaagccccaggaacaccccctagtcctgtggctcactgcattgttccaggaggtgtgtgtcacccttctctttccttgcctccttccctcccccaggccctgcttttctcttcatggagaaggcacaaattaggcagaaaggaaaacgttgacagttcccagccctcccttgctggggataaagagaaatacgttaacggttgaagctttaggcggatcaaacacagtttgtgagatgcttcaaatgtattattcatctcaccaatgagatgcaatcttgggctttctcttttcgccccatcaagaggaawcctcagctactgtgaagatgccaggctccagaggggagggggtgctttcagaataccatcttttcaattaaatcaacaagtccgtcttgtgtctgcccagtttcttctgaagctttccaaatgaaatgggtcaatttgccagagaayctaagagtacaaaggctgtgggtgacaaccacaagtattaggcagtgacaagcacctggaagcaaagaggagacatggaatcaaatctgagacacttagagaaggcaggagttggagccagtcctagaaggtcctccatgtctgcytgctcttgaggccatgtaactctcatgggctagaagaactccaagaggaaccatctcagctgtgcctttagctctgyggtgccactgcagaaggtggcgcttaggtccctggtgaggatccaagtccagccttgggttgttgctgtacaacttttggccttgtgatttggactggtggaggcccctgccccacctgcctggggattctacacccattcattgctcctcctccttttccctttggccactgaggtccctctgggctgctgccagcatcctagggttcttcaccccaagaagaagcttccccagcctcccatgagtttgcctcactgtctcacagaccttacacgtgtgctgtgttgaataaatctgatgtgggagtagggggcaggctctgcccgtggaacaggagattgggacagcccagagggaaggaaatttgacgtgatggatcaaaaagccataaagtatataccacctttgacccagcagttccatttcttaaagcacccccaaggaaatactagataagtgtgcaaagatatattgggtttgccattactttcaatggcaagaacagcaattacttttgctccaacctacaaaaagatacaaaaatgtccatytcaggtttgtctataataggaagacttgcaaacatcctaaaaccacaataataaaggattgattaaatagtagccttctgatctagtcatttaaaatcagattccagaggaataacaggaggaagtactgtatcaatatattttcattctaaaaaatttcccttcaatccttacccaatctcattattcttccccaaggtactcattgttatcagtttagtttgtatcctctccgatctgtatttttgaagaatcacatttaatgtaaacaagtaataaaaccaggttatgcaagtttatgactatagatgcatgtatctttgcaaagagaaaaggctggctgaaatgtgaacaccaaaaatgtgaacaatgttcaatgttcaactccaaatagtggattgcatatgattttttactttcttctgcaggaattactgtattttctatgtgaacggaaaagagaaacaatgctatttttgcaaacagtgaaacagaagcaattgctggcactggctgcctctgagcagtgggaaagcctgttcaccatatactcttttatgccttttgaattttgcactttgggcacgtatcacctattccaaaaatgaattaaatttttaaaaatttaatatggcaataaaatgaaatgaggggggtggtgaagacctccaaaggacagcaagccctgactgagaatctgtgaaattcctcaagctgtacagtttctgaatcagctcaggattcactccaatagtgctggtctctttctttctcaccagacaaggaattagggcctataacctagaagaaatgaggtagggtctaacataaaccaggctgccaggcaggaataactttataataatatacagcatagcaacagtaatggctcagttgaacctgttttcatacttttttgaagaacttttcatctccctttggttctccacattttccttgaggctacccactgctgtcaggttcctggggaggaaaggatgggacccaagaccttgtctaaagggccactgtttgaagtctgccagcaagacccacatttcccggggctgggtgttggtctcagacaacaactctctctccttcccagggcccatttcacccgtcaacacccagcttctgtcacctgtctctgagtctcaggttcctcacttgtaaaatgagggtaatcagcctgattatgagatgtggttgccagtcaacagactgtatggcaagggtgccacctgctagaacagaaggtccccagggctggagttgcttgcaagcacccaccctgggggaagaatctagacagcaagtccgagacctggtatrgccgttatttataagctgatgacagatattttcaatccgctgtgttgtgagaattaaataagacatgtgcgtctgtgtttgaggatgcaggccatccatccagcctagaaaacgctgcatgaaggatgaattctctccagccccaccaatcccatcttcctatgcctctactactcggacatctccttgtattgtcattgtgcaacttgtttcatgaacagtgtccccagactaattcctcaacaacacaatttgggtcctaatcattttaatacatcacgtagtagatccccagaaactgtttgctgaatgaataagtggatgctatttataaggccatgatccttgtaaattctcactakgctgcctcttgttcctgcccctgaagctgctgaagacctgcgttcccggtctgaattcactctaaactggacccagaggaggtgggagcagagaaattcagggagcagcacagtgtggtgaaaagtagactaggggtcatcctgaagcggcggccagagaagacacaaagacatgagcatcggatcaccatgcctttcttggccatccagaaaagattcggccttaacatagatcartggtggacaatccagagtgctgaacagccctacaagattgctgctcgatgccatgcttttgaaaaagaatggatagaatgtgcatatggaatcagtgttatccgggcagagaaagagtgcaagatagaatctgatgatttcgtagagtgtttgcttcggcagaaaacgatgagacgtgcaggtaccatcaggaagcagcaggataagctgataaaggaagggaagtacacccctccacctcaccacattggcaaggaggagcctcagccctgagcagagcagctgctgatgtctggaggctgaatttcctgttctctgttcctcactggaaagattgtttatggaaaacctccttgtcaaagtgtataaaaataaaggattgctccatcctaaaaaaaaaacaaaaagaagaagaagaagaaaaaaaaaaaggaaaagaaaagtagagtggggctgtcgtcctggccatcagagacttaacctctctgggctcagtgtcttcatctatatatggtcattagtagagcagatcggggttgaaaactcaaatgcccacagaggccaggaaaataatgtagacaaggcaacaaagggggaaggtggcaccctccctttgttggagagcaggcatgctccttgcacagcgctgcccttcttgcccgctgatcatcgccaattgatgcaagactgtgggtcaagtcttgtggcaagattgtctgatctttcaagggaagccagcaaagtggatttttatgtgaagtctcttgaataggtcaaactcaagtccataggccatttaccacctggaggccactggtttgcagtctcagcaccagcggaccacctggcttccttccagctcttcaattctgtgcgttcaggagaggagaacattcttgtaagtaactgtttaaagggaaggactcaaagtctggacctcattctggccgctgggcctccggtaactgccagcctgacccctaaactgcagctttatgcaaggcatgccccccgtctgccagcccccacccccctgccccaccaacacacgcacatcagggggcagaaatggggggtgaggaggagacaatgatcctttgtcctggggtgggccagggttcagcccctcctgttctgcccctaggagtgcccgccctgcctagagagctaggcctaggggcaaactgcccactcttaggctaccctgcacaggggtgcctaccggtgatacagtctcacctaataaattcctgtcagaaaagctgtcagggcctgggaaataaataatgatatttaacattttgtaataacaacaattaaccagtaaataatgtcctttaaactgcaaacgctagagtaaattaattcttctaatgagctgtcaggcacggaagaaaaaagtccccgtgttctttgctgccacgcggctgccgtgtgagcagccgaggaagctcacctcgggccctgggagctcattacagggaagcacgcggcgcggggttccagggaaatcagcccggcctagcctgcacccacgtgggcactcggccgccgcccgcacccggagccccacggccccgccctcattgtgcacggcgcgcccctccaggtgccgatcgcaaatgggcagcgcggagggcatttcaattagagacctccccctctcccttctggtcacctgggcggcgctcagcctcgaggtggcgggggacaggagctgggaactgaggcgggaggagggggagaaactctgcgcgtccctagtccttgctgcgtgaccttggagaggtttcttgcctctctgggcagggacgttgtaaatggaaatgtgaagctaatcaaaccagatgtgattatttctgagctcctgagaagtccgtgaccataaaaagacacctaagagtgaggcagctctttatgtactgattcggagtaatctccaagatatattgtcaggtgacaaaagcgaggcacagaagagcttgcaggggatgctacatcttgtgtattaaaagcaggactcaagaaagagtatgtgtccgtgtttgctcttataggtctagacaggaagcaggtaacattgcttgcctctggggaggggaagctggagacgggggctggagggagagttcagtgaacaaccttttatacccttattatttgaaccatgtacaggtattacctattcaaaaaataaacgttacgaaaaacaaagccatacacatcaggggtcagcttgtctctcagtagctttcaggaagtggaagccacaggggcccagctgcactgaagccccatgtgaaatccctccaaagagagagagcacactgcctctctaataacctattctagagacaagctaatgagtcaggaagtccttcccagtagctaatcccattccctcctgctacaatttaagtttctctcttcatgttctgtgtttggtgggtgaaagggctgatagataattctctgcagagagctgggggtagaggacagccactgtatggacaggagagaatgaacggcagtcccagccctctggagcccacaggcctaggtttgaattcacttctgtcacttgctcactgtatggtgttgtatgtcactctccccactgcgcttccacttcctgtggtccctgcctccctcgggaggatattaagtgctggacctggtgaacaggcatctacttcccatggaagcccacaggtccattgctgcccaagatggacagagaccccctgcacaatcctgggtcatctgcccaccccttcccagatctatggctctcccagctgcgacgcccaaccccacctcccacccggagcagccagatacagcctccctatggccagacgcagctttgcccatttggcacctaaattgtcatgccctgaatccagaacaggttcaaggtagctggtggctcagagatagtgttggagccagaaatcaccagaggtgatcacttctgagctcctgagaagcccgtgacctaagacacctaagagtgaggcagccctttatgtgctggcccagggcttgaggaaagcacttgagcggctgctttggggctgagggtgagagaggggttcaagccaggagaactcccagccccctatcaccatctgaccaactccccctttatctattttgtatccttgccatcttcataaagtgtcttttgattaaagagtttcttagctggccaggcgcggtagctcacgcctgtaatcccagcactttgggaggctgaggcaggcagatcacaaggtcaggagttcaagaccagcctggccagcatagtgaaactccatctctactaaaaatacaaaaatgagccgggcgtggtggcacacgcctgtagtcccagctactcgggaggctaaggcaggagaatcgcttgactttgggaggtggaggttgcagtgagatcacgccactacactccaacttgggcaacagagcgagactccatctcaaaaaaacaaaagagtttcttggctaaaacatatttgaaatgccctgacctcggccattcagaactgggcacctaaggcatggggtttcagaaagagcagggacaagagggggaaagaacccaatgcctactaaggacccactttatgccaggcacttcccatgcaattttccctcttaatccgcacaacctgtggtttgagtaatattatccccacggtatggacaggatgagggaagttccaaggggttaatagacttgcccaggtgtattcaacaaataagttgtagttgggctagaatttggacccagatctgctgacttcaaagccacatctcctaacacactgctgcctgtcccagcccctcacctcaccatctagatctattaatgtgatggggtgcaagtggggtgggacagagctggggtgtgggaaggaggccagctcagcctcttgaccctctctttcctcaacatcctctactcagtacctgaagcattgagatgaaaattcaaggaacaattgctgattgtaagaattcatgagaaaggctccccttccctgggagcctagaggaaatgcactggcttctcctctcagaatctgcttcctcctctctaaagtaggaattacttaaccaggtaatatctagccagggggagagtatgggcacctctgatgtcatctttaggagactgtggtggctgaagcttaggcacagaagtctaatacacatgagttcaaatccacgctctaccacttacaagctgtgtgactcaggacaagttacttaacctctttgagctttgttttccttccctgcaaaatgtggatcattgccactgatctctttgggctgttacaaaggttaagaagatgacgtgtataaactgcttagcatggtgcctgggcattaagtaggcacccaatacatgactacatctgtcctgatgagttttttgttgccctgccagacaaactcaatctcccagaccaaaaaggcagttgtcctggtgcctgagataggcagcctacctctgcagcttcctgatttgggaggcagcccagagaggcctccaggcttggttttttgcaaagggcagcggaaaatcgaagctgaagccagcaaaacaaggatcccagcagtggatctgagtcagctgcttctgggtctgggggttcaagagtcttcctcaaagtaacatagcttcctggttaccctgtcctccctgtagctgcccccttggcctgagtcctctgagggccctgggcacctgtgtgcacagagcatcagctgggaaagaggggtgctccagtgagtagaggaagctgggtctcagccacgcggaaattaaaaccagcttgcccagcactgagttaccatgtcgcctgaaatcagattgatttattgggcttgttgtgacggcagtgttgcaattgattcgtctggatggcggggagtttatctattcagagctgtctgtcactgatctgaataagctgctaaaacagcccaaatacctggcgagggcgaggtcaccaccaacctcggctcaatgttaattataataatgaacaggcatgaggagggttggttcattgctcgcccagcagggctggcctctatgaggtttggtgtttaatattcatttcatgtcaacaatgtgcaaagagcgagtagactctcctaagctgagagaagtttgcaagggcaatgatgttgatctgtgcttccatgggactaagaaggagccagtgctgctgaaacagaaaaggtttaggttagaccttaagaagaacttcctaatgaccaacagtggatggacatagaatatctaattcacttattagcctggacaagttactgctcctccttgactcagcttcctcctctgcctggccaacatggtgaaaccccatctctacaaaaaatacaaatataggccgggcgcggtggctcacacctataatcccagcactttgggaggccgaggcgggcgaatcacgaggtcaggagatcgagaccatcttggctaacatggtgaaaccccatctctactaaaaatacaaaaaattagcagggtgcggtggcgggcgcctgtagtcccagctactcaggaggctgaggcaggagaatggcatgaacccgggaggcagagcttgcagtgagccgagacagcgccactgcagtccggcctgggcaaaagagcgagactccatctcaacaacaacaaaaaaatacaaatatcagctgggtgtggtggtgcatgcctatagtcccagctacttgggaggctgagatgggaggatcacctgagcatggggaggttgaggctacagtgagccatgattgtgccactatactccagcctggataacagagtgagatcctgtctcaaataataataataataataataataataataatacttacttcttggagctgctgctactgctgctcctggccaaatagcaagaaaaggaaaaacaaaactacaaaactggcaggctcttctgggttgttggttcagggagcaacaaaggggtcctactttgggtgacagatcacccttctcagccttggtacggagcgagcattccatcaatggggcttttgtaatagttattgattctgtgactatttattgagccccttctatatgcccgaacctgaagaaaaactattgaacaagccatgatccccagcctttaaggagactaattctggggttactatgggagctagggcaccctcctcaccggaggctctcaggaataagggtgagccctatctctgggagatagcttagaaagtgctcctggaggcaggcagatggatgtgaagacctcatgcggtagctgcttggggttgtttgaggcataattatccagcagaagagcctactaaacat

SEQ ID NO: 93498 - DNA, 101792 bp, Homo sapiens
aggagggtgccaaaataaagaatttctatcatcagcatactctgtgcacataaaaaaatgtgcaattacagcaaataaacattaactacaggataaaatatcagatctttcgcattttcatgaaatctaaccttactaaatatttcatctcttctatgttttcttccaaggtttctgcatgctgttcccatgacaatatgcacattgaaagagggttataaagtcctagcatgtaatcccagaggaatataaattaactttgttataggagacatgcttaggttgttcctgccttgtttacattttgtatttaacagcactgtccttctaaactctcaaaaaatatatatgctgaggaggcagagaaagatgatgaaatggaagtctttaccagttgccaccccacccctcaagtacaccaatttaacaactatgtacattaaaaatgcacctttatgataaccaaaaatcaggtgagcactcacagtactggttttaacttcatatcattgaaagaggcactaaacagctagaaaaaaacagtcttgattcaccagtggcacccctccccaaccccactgcagctgcagcaaggtgccaagacggtttaagtgcactgcaagggggagaacacagcaattgtgaggctctgaactcagtgatgttgtataagagcagaaagaaaaaccggaccaaactcaactaatgcctgcccatgaagggagaatttaaaccagccctagcaagaggggaatcacgcaacyccagaggtcggaacctgagttcctgcaaacctcaccaacctgggctaaggtactctggggctctaaataaatgcgaaatgcagtctaggaaacaaggactgcaacacctagaagagtcttagtgagggaccggggccagagtcagtgaactgggaggcagaagacctactgaaacttcagcttgggcagccaagggagtgctggcatctcccctctcctcacttcagtccgcaaatttcaaagccccaaaagagactccttccttccgcctgaggataagagatgtaactgtggaaaggactttgtctttcatcttggatgccagcttagccacagcaggatagggcactcatcagagtcctgaggccctgtttccaggacctagctcccaaatgacattgctagacacacgctgagccagaagggaacctgttgccttgaggggaaggacctagttctggcagcattcatcacctgctaactgaagagcccctgggccctgaataaccagcagtgatacccaggcactagattgagggcttcgggtgggggtctgagccttgatggattcaggtaagactcagcaaatttctagctgtggtgactgtaggcaaagactccttctgcttgagaaaagcagagagaaaggtaaaggggattttctcttgcacgttaggtaccagtttagccacagtgtgtagagcaccaagcaggcatttggagtccccgattctgggacctggctattagatggcattcctagacctgctctgggccagagaggagttcatgtctctggaaggtgagtcccaggcaaggcagcactcaccacatgctgactgaagagacctggccccttaagggactattggcagtaggctggtagtattccacatgtgcccgtggtggtagtggctatggggtgaggctcctctgcttttggaaaaaggagggaagagtagaaagaacggcatgcagtggattgactgccagctcagccacagtacaacagaacaccaggcagacttctaaagtttttgaatctagtccctggctcccagactgcaactctataactgcctggggctagggggaacttgctgccctgaaaggaaggacagaggcctggctgtctttgccacccactgattgtagagccccagggtactgagcaaacataggtgggagaaaggaagtggttacagtaggccatgggtgagacccaatgatgcgctggcttcaggtctgacccagtgcagtcacagtggtagaggccacagtggcgcttacatcactccatgctcagcttcaggtggctcagaacagagagggagagactctgtacatttgggagaaactaagagaagagaacaagagtttctgcggataatcaaaagaattctcctgaatcttgtccaagaccttcaaagcagtacctctataggtctgcaagaacaacagtgttactgtgcttggggtgccccctaaagcagacacagcttagatcagaacacccaagtcctttagaatatctggaaagccttctcaagaaggacaggtacgaacaaacccagacagtgaagactgcaataaatatgtaactcttcaatgcccagacacagatgaacatctacaagtatcaagatcatccaggaaaacataaacccaaccaactaactaataaggcaccagtggccaatcctaaggaaacaaagatatctgacctttcagacagagaatacaaaatagttgtgttgcaaaaactcaaagaaatgcaagataacaaagagagggaattcagaattctatcagagaaatttaacaaagagaatgaaataatttaaaagaagcaagcagaaaatttggagctgaaaaatgaaataggcatactaaagagtgcattacattttttaaatagcagaattcttcaagcagaataaagaattagtgaccttaaagacaggctatttgaaaatacccagtaagaggataaaaaacaaaaaaataaaaatagaaaacaaggaagcacacctacaggatctagaaaataactgcaaaggggaaaatcagagctaatggccttaaagaggtggtagagattgagttagaagtagaaatattattcaaagtgacaataagagagaatttttaaacttagagaaagatgttaatatccaagtacaaaaaggttatagagcatcaagcagatttaacccaaagatgcttacctcaaggcatttaacaaccaaactcccaaaggtcaaggatggagaaaggatcctaaaagcagcaagagaaaagaaaaaaaatgtgcagcggagctccaatacttctggacatctcagtggaaatcttataagctggaagagaatggcatggcatatttaaagtgctgaaggaaaatacttttaccctagaataatatatctcgtaaaaataaccttcaaacatgaaggagaaataaagactttcttagacaaacaaaagctgagggatttcagccacaccagacctatcccacaagaaacacttaatggagtacttcattcaaaaataaaaagatgttaatgagaaataaatcatctgaaggcgcaaaacccaccggtaatagtagctaaacagaaaaacacagaatattgtaacactgtaaatgtggtatgtaaactattcttatccttagtaaaagactaaactatgaaacagtcaaaaataataatgacaacaatctctgcagacatagacaacacaataagatgcaaacactaagtacaaaaggttaaaaagtaggtaacaaagttaaggcacagtttttatgagttttctttttgcttgctggtttgattgtttgtccatgcaaacagcattattatcggcttaagataatgggttacaagacagtatttccaagcctcattgtaacctcaaaccaaaaaacttacaacagacacaccaaacatgaaaagcaggaaattgaatcatatcaccagagaaaatcaccttcacaaaaaaaagaaaggaaagaaggaaaaaattaaaaagccagaaaacaaataacaaaatggcaagagtaagttcttacttaccaacaataacactgaatataactttactaaactctccaatcaaaagatatgaactaaaatttccaatcaaaaaacatacactggctgaatgaattaaaaaagtaagactcactcacctgtggcctaagaaaaatacagttcacctataaaggcacacatatactaaaaataaaagggtagaaaaagatattccatgcacatggaaaccaaaaaagaaagagaaagagtagctatacttacatcacagaaaacagatttcaagacaaaatctataataagagacaaagaggaacactatataataataaaggagtcaattcagcaagaggatataacaactttaaatacatatgcactcaataaaggagtccccaggtagatgcagcaagtattattagagctaaagtaagagatagactccaatacaatcagagctgcatacttcaacaccacactttcttcattggacatatcttccagacagaaaataaacaaagatacattagacttatctgcgctatagaccaaatggatctaacagatatttacaaaacatttcatccaatggctgcagaatatacattttttttttcctcagcacattgatcattctcaaggacagaccatatgttaggtcacaaaatatgtcttaaacaattgaaattatatcaagcatcttctctgaccacaatggaataaaactagaaatcaataataagagaaatttttggaaactatacaaacacatggaaattgaacaatatgctcctgaattatcagtgggtcaataaaaaaattaagaagcagattgaaaaactccttgaaacaagtgacattgaacatacaacacactaaaacctatgggatgcagcaaaagcatccttggtctatgtatccttgtttgcagatgatataatcttatatttggaaatatctaaagactccacaaaataactattggaattataaaacaaattcagtaaagttgaagatacaaaattactatgcaaacatcagtagcattgctatatgtcaacagtgaacaatgtgaaaaagaaattaaaaagttatcccatattcaatattgagagaagtttatagctatcagaacctatatcagaaaagaagaaaaacttcaaataaaaaatctaaagatgcatcttaaagaactagaaaagtaatagtgaactaacttcaaaattagcagaggaaaagaaataatgaagatcagagcagaaataaatgaaattgaaacaaaaatatacaaaagatcactgaaacaaaaagttggttttttgaaaagttaaacaaaattgacaaacctttagccagactaaaaaaaaaaaaaaaaaagagagaagatctaaataaatcaaatcagaaatgacaaaggcaatactgcaactgatactgcagaaattcagaggatcattagcggctactatatgccagtatatgccaataagttgaaaaatctagaaaaaatggtcaaattcctagacaggaacaacccaccaagattaaatcaggaagacatccaaaatttgaacagaccatttccagtaatgaaagcccaggacccagtggcttcactgttgaattccaccaaacatttaaagaactaacaccaatccgactcaaattattccaaaaaaaaatagaggaggagagaatactttcaaatgcattttgtaaggccagtattacactgacaccaaaactagacaaagacacataaaaataaataagtaaataaataaataaactaactacagaccaatacttctgatatatatggatgcaaaaatcctcaacaaaatactagcaaacataattcgacaatacattaaaaacatcattaatcatgaccaactgggatttatcttcgtgatacacggatggtttaccatatgtaaatcaatcaacgtgatacatcaaatcagcagaatgaaggagaaaaaccatatgattatgtaaattgaggctgaaaaattatttgatagaatttaatatccattcatgattaaaaaaaaaccctcaaaagactgggactagaagtaacatacctcgactgtaccaacatggtggcgcccaggtcctaatttgagaaacgtgcatcttgactaattcggttttctgtggttacgagagaagagccmggtttatcgcgaggggcagtccccagggctgccgaatccagcagcgatggagagcggcaccgggccctgcggagaagagcgcccacgtkwagtccagcagacgacagtcactgagggggctgccaaaatcccagcgccaacgaggtcttttataaccttgtgcaggaattcagtcgggacatgacgtgctgtgatcatccagtttgctcgcattcagcttggggccaaaggaatccagatcaaggtgccaggagagaaggatacacaaaaggtggtcgtggacttgtcaaagcaagaggaggaaaaggttgaaccgaaagggagtgaaaacctggcctcaggagaccagcctcgcacagcgaccgtgtgggagatctgtgaggaaggcctgcatgtgctggaaggcctggcagcttcaggcctactttccattcgatttgccctagaggtgactggggctcagatctgtggttgcaaacgatacctctgcgggggctgtggatctcatacgctggaatgtgcagctcaatgacgggcccacctggtacagcccagccaagtagatgcctggatgctgatgtaccagcaccagagggtgtcagagaggttcgacgtcatccatctggacccctatggcagtcctgcccccttcctggatgcagctgtgctggctgtgagtgaaggagagttgctgtgcgtgacccgcacggacacggcggtgctggcgcggaacagtggggagatgtgttacagcaaattcggtgccatggccctcaagagccgggcctgccacgagatggccctgagaattgtcctgcacagcctggacctccgcgccaactgttaccagcgcttcgtggtaccgctgcttagcatcagcgccgacttctacgtgcgtgtttttgtccgtgtcttcaccggccagcccaaggttaaggcctcagccagcaagcaggccctggtgttccactgagtgggctgcgggtgcttccaccttcagcgcctcggcaaagcgtcaggagtcccccgcggccgggtcaagtcctctgtagcctgtgttccccccgtgaccccgagcgtgaacactgtgggcagcgacaccagcttggttgctccatgtgggcagagcccatccatgacctggatttcgtgggctgtgtcctagaggctgtgagcgctaaccccggccgcttccacacctcggagcggatgccagagggtcctgagcgtcatgactgaggagctcccacaggtgcctctgtactacaccctggaccagctgagcagcaccatcctctgcaacacgcccagcctcctgccgtggcggtcggccctcctccacgctcacttccgggtttcgctctcccacgcctgtaagaacgctgtgaagacgtatgccccgcctccgccctctgaaacatcatgcgctgctggaagaaggaatgtccggtgaaacaggagcgactctcagagaccagcccagcgtcccgcattctcagtgtggagcccaggctgcaggccaacttcaccatccgggaagatgccaaccccagctcccgccagcgacgactcaagcgcttccgggccaacccggaagccaactggagcccgcagcctcatgcctggccagggagcaaggctgctggcgaagctatggaggagagacgcaggctgcttcctaaggagtggaaggagccgcctgaggacagggcccagcgagctgccctgctcaagacatttccttgcaaaagggttaaggaggggggcggggcgcggtggctcacgcctgtaatcacagcactttgggaggccgaggcagacggatcacgaggtcaggagatcgagaccatcctggctaacacggtgaaaccccgtctctactaaaaatacaaaaaaattagccaggcgtggtggtgggcgcctgtggtcccagctatttgggagactgaggcaggagaatggcgtaaacccggaaggcggagcttgcagtgagccgagatcacgccactgcactccagtctgagtgacagagcgagactccgtctgtaaaaaaaaagggggttaaggagggtacctgtcaatgcggggaccagtgctgctactcccacagccctctgacacccggggtctctgctgatgctgcgcttcactgtccagagacctccaatcacagaccccctggacctggggctgccactgggcccggaatagactgaaccaataaagagatgtcggctgggcgcagcggctcatgcctgtaatcacagcactttgggaggccgaggcgggcggatcacgaggtcaagrgatcgagaccgtcctggccaacatggtgaaaccctgtctctactaaaaatacaaaaaattagctgggcatggtggcacacgcctgtagtcccagctactcgggaggctgaggcaggagaatcgcttaaacccaggaggcagatgttgcagtgaaccgagatggcgccactgcactccagcctggcaacagagcgagactccgtctcaaaacacacccacacacacagagagagagagaggtcacgtaaccttctcccgattaaaaaaaaagaagaagtaacatacctcaacataataaaagtcatatatgacacacacacccacagctagcatcacattgagtggggaaaagatgaaagcctttcttctaagatctgggacataaaaaggttgcccactttcaccactgttatttaacatagatttcaaagtcccagctagagccatcagacaagagaaagaaacaaagttcatccaaattggaaaggaagaagtcaaattatttttgtttgcagatgatataatcttatatttggaaaaatctaaagacaccacaaaataactattagaattactaaacaaattcagtaaagttacagacacaatatcaatatacaaacatttccaggtcattggtctaagcaaaaatttattgagtaatacctcaccaacacaggtaaccaaagtaaaagtggacaaatggtatcacatgaaatttaaaagcttctgcagagtaaagcttacaataaacaaagtgaagagtcaacccacagaactggagaaaatatttgcaaacttcccaaattcaaacaactctatggggaaaaaaaamcgaataaatctatccccaaatcccaaaatgggcaaaagatgtgaaaagatattgctcaaaagaagacataaaaatggcaacaggcatatgaaaaggtgttcaacatcattgatcatcagagaaatgcaaatcaaaactacaatgagatatcatctcatcccagtgtaaaatggcttatatgcaaaaacaggcaataacaaatgttgtgaggaagtggaaaaaagggaatgctcgtacactgttggtggaaatgtaaattaatgcaacccctttggagaacagtatggaagttcttcaaagaactaaaaatagagctactgaatcatgcagcaatctcgctactgtgtacatacccaaaagaaaggaaagcagcatgttgcagagatatctgcacttccatacttcttgcagcactgttcacaatagccaagatttggaagaaatctgtgtccattgggtaaagaaaacatggtacacatacacaatggagtacaatgcagccataaaaaggaatgggatccagtaattgcaataacatggatggaactggaggtcattctgttaaatgaaataaggtacagaaagacaatcattgcgtgttttcacttatttgtggaacctaaaaatcaaaacaattgaactcatggagatagagagtagaaggatggttatcagaggctgcaaagggtagtggtggttgagggggaggtgaggattgttaatgggtacaaaaaaatagaaagaatgaataaaacctactatttggtctcttaacagggtgactatagtcaataataatgtaattacacattttaaaaataactaaaagtatataattagatgttttgttacacaaaggataaatgcttgaagaaatggataccctattttccatgatgtaatacttgaaccaaagtatctcatgtaccccataaatatacacacctgctatgtatccacaaaaatttaagataaaatttttaaataaaaagagaaatgtgacatatatattatgtgatatatagatccacaagtttgctaggggctgatggcagtttgagctctctgattctcattagtctttgatgtttggactggtagtcccttttctcaggagctttaatcaaaacaatgtcctttctcatcactctagccaggaactgtgaagctaagtaaggccaaatcaatctccctgcccttaatcttgtatgtattcctaagtgtgaattgcctactactatttaatagtcctgtaggataagtctgatatcagaatttagactgcatttcatccttgttctacttggaacyttttatgatttccctcctccactcccctccaagcttaacctcatctcctttcccctctcctctcttttcatccccactcatgtacatatatactacacacacacacacacacacacacacacatatacatatatatccacacacacacacatatacatatatatccacacacacacacacacatatatatgagtgctaaataagagattataargagaatatttgacaattaataggtaaataagtgaccattgactagtagcgattattaaggcagttagcatttattttaactctccatcccaaaataacagaatatatattattcttatctgcacattcacgtactctaaaatagaccacacaatcagacataaaacaatcaagtactgaaattgctgggtcaaatggtatttctgtctttaggtctttgaggaattgccagctgtcttccacaatggttgaactaatttacactcccaccaacagtgtagaagtgttcctttttttccacaaccccaccagcatctctcattttttagctttcttataatagcctttcttactggtggaagatggtatctcactgtggttttgatttgcatttctctaatgatcagtggtgttgaacttttttccatatgattgttggctgcatgtatgtcttcttttgaaaagtctctgttcatgtcttttgcccactttttaatgaagatgttttttacttgtaaatttgtttaggtttcttatagaggctggatattagacttttgttggatgcatagcttgcaaaaattttatcttattctgtaagttttctgtttattctgttgatattttcttttgctgtacagaaactctttagtttaattagatcccatttgtcaatttttgctttcatcgcaattgctttgggcatctttgtcatgaaatgtttgcacgtgcctgtgtcctgaatgttattgcctaggttgtcttccagggtttttatagttttgggttttacatttaagtcttcaattcatcttgaggtgatttttgtatatggtgtaagaaaggggtccagcttcaattttctgcatatggctaaccagttaacccagcaccatttattgaataagaatttctttccacattgtttgtttttgtcagctttgtcaaatatcagatgattgtaggcatatggccttatttctggactctctattctgttctgtttgtctgtatgtctgtttttgtatccgtaccatgctgttttggtcactgtagccctgtagtatagcttgaagtcaggtagcatgatgtctccagctttgttttgttgcacaggattgccttggctatccaggctctttttttttgttacatattagtaggagctaaatgatgagagcacatggacacatagaggggaacagcacacactggagccgtttggagggaggacggtgagaggagggaggggattaggaaaaatgactaatggtactaggcttcatacatggttgataaaataatctgtacaacaaacccccatgatacaagtttacctatgcaacaaacctacacttgtacccctaaacttaaaagtaaaaagaagactatccaaagcaaattataagaattagaaattataccaaacacactcttggaccacagtgcaataaaaatagacatcaatgctaacaaaatcacacaaatccatacagttacatggaaagtaaacaactcgctcctgaatgacatttgggtagataatccaattaagttagaaatcaattaatactttgaaactaatgagaacaaagatataacataccagaatgtctgggacacagtcaaaacaatgttaagagggaagtttatagcactaaacgcccacattaaaatgtgaaaaagatcacaagttaacaatctaacatcatacctagaggaactagaaaaacaagagcaaaccaacccaaaagctagcagaggaaataaccaaaatcagagctgaattgaaggaaattgatacatgaaaaaaacacacaaaggatcacgaatctaagggttggttctttgaaaaaaaaaataataagatagaaagaccactagcaagactaataaagaaaaagagggggagtggccaagatgactgacaagaagcagctagtgtgcatggctctcattaagtgaaacagaaggggcaagtaaacacagcaccttcaactgaaacatctaggtactcacattggggctaatcaaggaaactacttgacccacagagaataaagaaaacaagacaggacaatggcccatccaggagcaacatggagccagggaatctgcccctcacccaggaaagtggtgagtgaatgtgtgaccccaggaaaccatgcttctcccatggatcttagcaaccttcaggtcaggagatatccttgtggacccactccatcagggccttcggtctgacagatggagctatgtggattcctggcagascatcagctcaagcatgcatggagaacttggagccttacatacttgggcattctggaaaaagtagttgcagctctggaaaagtgggaggttatatccctgcacatacctctaggtaggaggctgaatccaagaggccgagcagaaacatcctgcaggcttcacttccatggcacctcacaaggtgagatccactagcttggaattccagccagctaccagtagtggtattgcacctccataagaaggagatcccaggtggaggggagctgccatctctgctgtatgggagacttagctgtttcagcctttggccattgaatagctcgagctgaccaggggaaaagggattccccagtacagcatagctgttctaccaaaacgtggacagactgcttctttaagtgggtccccaatcccattcctctttcactgagtgggacttcccaatgggtgcctccagccacccctgtcagtattctgcagctggctgacagagatttataacctccctggcaccaagctcccagagggaggggcagggcatcatctttgctgtttgggtgacttagcctttccagctttcatgaatctgagtgtgcaaggcaattagagactgaagtggacccccagcacagtacagctgttctaccaaaacacggccacagtgcttttttaagcaggaccccaatcccattcctcctcactaggcaggaccacccaacctggccttagggccaggaacaggcccatgcctccctggggcaaagctccaagagggagggacaggctgccctctttgatgtttcacagccttcactaatgatgcttccaggtactgaaaaatctgagatgacaagagactgtaatgggtcccaagcatataacaggaaccctacagaaaagcagccaaactgttatgtgggtgctcattcccatatcccctcaatggtcaggtactccaggcctgggcctcgaaccaacccacaccagagctatcaagccagtagcaacttggcaactccccagacagagcctccaggggcaactaaaagcccctctgccactgcctctgcagtggaactgcacttgccacccttggactaatgaatgagcaaagaccctaagtgccttatccatacttccaacaagctgcagccgatccaaggagaagaggtcagtcagtctccctcaggtcccacacacgacccactgcacatccccagagagggaacccttgacttaggacaacagcacagaccctccaccctgggccgattgctctgagtgattgctgacctgcatcactctggggtggagcccccagcagacaagcaaacaaccctcagccacaagcagtactaaggtcccttcctttgctgcctccaagttgaggaaggaacataaacaccaagattttcacaaagctgctgtgggcggcccaggagtgtcaagttatgatctacagccagcactcaagggggagaacaatccacacatttggagcattgagagggaacacagctgcaacagtgaggaaacataggggagccacayaactgagcaagagtctaccaactgaccaataagcctaagtgccacttgctggatcacacctcaaaacttcaacatcaaaatacctaacataagccctctgaaaccagagacaagaagtcagcttcaaataaagactctgcacaaagcctcagcctgctgaaaatatccagaaaagaagtctattaactctactcaatctacactgcagttaaaggtacactcacacacagaaatgagaatgaatcaatgcaagaaccccagtaactcaaatggccagagtgtgtatgtcctccaaatgatcacacctattctccaatgagagttcttaaccakgctgaactggctggaatgacagaaatagaattgagagtatggatagacacaaaaattattgagattcaggaggatggtaaaacccaatccaaggaaaataggaatgataacaaagtgatacaggagctgaaggatgaaatatccagtataaaaaagaacctaacagatctgacagagctgaaaaacacaatacatgaaattcacaatgcaatcacaagtattaacagcagaataaaccaagctgatgaaagaacttaaaagactggttctctgaaataggacagtcaaaaaaaaaaaaaaaagaaaaaagaataaagagcaataaacaaaaactctgcaaagtatgggattatgtaaaaggtccaaatttattaatcattggcatccctgaaagggaggaggagaaagtaaacaacttagaaagcatgtttcaatatatcatctatgaaaacttttccccaacattgctagagaggccaacagtcaaattcaggaaataaagagaattccatcaagattctgcacaagaagatcatccttaagacatgtaatcatcagatatttcaaggccgtgggagcccacctcttgcatcagtgtgacctggatgtgagacatgagccaaaggaggtcattttggaactttaaggtttaatggctgccttattggattttgaacctgcgtggggcctgtaactgctttcttttggtcaatttctcttatttggaatggttgtatttacccaatgtctgtactcacattgtatctggaaagtaactaacttgcttttgattttacaggctcatagttggaagggacttgctttgtctcagatgagaccttgaacttggacttttgagttaatactggaatgagttaagactttggggaacggccagaagggcatgattgtgttttgaaatttgaggacatgagatttggatggggccaggggtggaatgatattgtttggctctgtgtccccacccaaatctcaccttgaattgtaataatccccacatgtcaagggcaggaccaggtggagataactgaatcatggggggtggtttcacccatactagtctcatgttagtgagtgagttctcatgagatcttcttatgagatcatgagatctcataaggggctcccctttaccggctctcattctctctcctgcctccccctgtgaagaggtgacttagccatgatggtaaatttcctgagggatttccagccatgcagaactgygagtcaattaaagctcttttctttatcaattacccagtcttcggcagttctttatagaagcgtgaaaatggactaatacaggctgccataacaaaataatcacaaattaaataacagaaatgtattttctcatagttctgcagtgtagaatttcaccattaatttgtcagcagtgttgaatttttctgagggctgagagagaatgaatgatctgctgtaagcctctctcctaacttctgaggtcttgctagcaatctttcatagtccttgactagtagacacatcacccccwtctctgcctttatcatcacagggcattcttcctgttcacgtctgcattcaaatttctcctttttataaggacatcagaaatataggattaggggcctaatctactctcatatgacctcatcatatataattatgactaattataaacctacaaagatcttctttccaaataaagtcacatgctgaggtactagaaattataacgtcaacatatgaattctaggaggaaacaagttactgatactgatacaaaaacagtcacacatacaaccgtaacagaatagagagcccagaaataaagccatacacaagttaattcataacaataactacctcctgtaaatgattggcaggacaggagcagggaggcagttggggaggcagttgataagagtaaatgggagctctctacattttcaatctgatacggacatggtaaatctgcagaaataaatgaaataggaaacaaaaacatagaaaatatcaataaaacaaagaggttttttttaaacatcaacaaaattgacaaacgtttcgctagattaagaaaaaaagaagtttcaaaaaataaaattaaaaattaaaaaaggaccttacaaccagtgctacaaaaattaaaagtataatcttcctctggtttccacagggaagtgtctcaggatccctatacataccaaaatctgtgggttttcaacttcctcatataaaatggcacagtatttacagtatttagatataaactatgcacatccttgtgtatactttaaattatctctagatttcttatacaatacaaagatttcttatacaatgtaaatcctatgtaaatgattgctattctgcattgtgttttaaacatttgtattatttttattgtcatattgtttattttttgtgaatatttttctatctagagtaagttgaatctgcatatgtggaccaacagatatggaaggccaactgtattctgagtctattatgaacaattatacatcaacaaattggataaccactaagaaactgctaaattcgtaaaaacatacagcctttctggactgaatcatgaagaaatagtaagtctgaacagacttataactagtaagctgattgtttaagtaatctaatgcctccccaaaaagaaaagcacaggataagatggcttcactggtgaattctaccaaatacttaagaagaattaatgccagttcttctcaaactcttccaaaagattgaagaggaaaaaaacacttcgaaagtcattttatggggccagcgttaccctgatattgaagacaggcgaagccaatttaaaaaaagaaaactttaggagaatatccctgatgaatatagatgcaaaaatcttcaacaacaatatactagctaaacaaattcaacagcacatttaaaagataaagcatcatgaccaagtgggatttatccttagtatgtaagtatggtcaacatataaaaatcaaacaatgttttataccaccttaaaagaacaaagtataaaaatcacatgatcatgtcaatagattcagaaaaagcatttgatgaatttgacatccttttatgataaaatcatgcaacaagctaggaataaaagaaaattacttcaacataataaagggcatatatgaaaagcttrcaactaacatcatactaaatgttgaaaacctgaaagtgttttccctaaggtcagaaacaagataaggatactcactcttggcaattctactgaacatagcatgagaagtgcctgccagagcagttagacaagaggaatacataaaagatatccaaatcagaatagaagttaaaatgatctctctttgcagatgatataatcttgtatgtagaaaatgctaaatatttcaccaaaaactgctataactaataagccaattcagtaaagatgcaagatacaaaatcaacattaaaaattaattgtgtgtctatgcactaacaacaaataatccaaaaaggaaattaagaaagaaacccaattttcaatattatcacaaagaataaaatatytgggaataaacctaataaaggaggccaaagacctgtacgctgaatggtacaaaacattgttggaagaaattaaagaagacccagataaattgaaagtcatacctgggtcatggattggaagatttaatattgttaaaatgcccatactactcaaagcaatctacagattcaattcaaaatatatcaaaatctcaatagcatttttcacacacaaaaagtgaaaagcaatcttaaaatttatacggagtcttaaagtaccacacatgtcaaaaacaatcttgagagagaataacaaagctgaagacacaaccctttctgatttgaaaatatactactttgctacaataattacaayagtatgggagtggcataagagaagacatagacaaatgtaaccaaatagagtgcccagaaataagctcatgtggatatgatcaaatggtcttcaacaaggttgccatgactacacaatgggaaaagaaatagtctcttaaacaattgatgttgtggaaactgaatatccacatacagaaaattggaattggacccttatcttacattagccacaaaaatagactcaatgtagattaaagtcttagatataagacttgaaactataaaactcctagaagaaacatggggaaaaactctttgacattggtcttgasaatgattttttggatgtgaccccaaaagcacaggaaacaaaagcaaaattagacaagtaggactacatcaaactaaaaagcttctgaacagctaagaaaacaatcaacagattgaaaagtcagcctactgaatgtaagaagaaatctttacaaatcctacgtctgataatggattaatatccaaaacaaaatgaactgctacaacacaaaagcatgcgcgcgcgcrcrcacacacacacacacacacacacacacacacacacacacacataacctgattaatgaatgggctatggacttgaatagacattgctccaaagaagacacacaaatggccaagtatgtggaaatgtgttcaacatcattaattatcagaaaaatgcaaattaaaaccacaatgagatatctccttccacctggtaggatgactattatcaaacaaataagagataacaaaggttggtgagggtatggagaaaggggaccctagtacactgttggtgggaatgtaaattgctgcagccattatgaaaaacagtatgaagtttcctcaaaaaattaaaaataagactgcaaaatgatccagcaatactattttgggatatttatccaaaagaattgaaatcagcatttcaagaagttatttgcactcttatgtttatggccacattattcacaatagccaagaggtgggaacaatctaaatattcatcagcgaatgactatgtaaataaaatgtaatatatacaaacaatggaatattattcagccttaaaaaatggaatggaattctgtcatatgctagaacatgggagaaagggctatggacttagtcccttaaatcaatggggctatggactatggggctaaggggctatggaattagccccttagattaattaggatactaatctaagtgaaataagccagtcatagaaggataaatactgcatgactccacttatatgaggtatgtaaagtagtcaaactcatagaaatagaaagtagaatggtagttgcaagaggtgaaggagagggggaaatgggagttactacgtgataagtatagaatttcagtcatgaaaaatgaaaaaattctagagatccattgtacaacactgtacttatagttaacaattctgtactgtgcactcacaaatttaaggaggtaaatatcatgttatgtgttttttttaccacaataaaacaaaaatatctcaatagtttacctaattattacctattaaaattcctttctgtcttgaaagaaagagcgaaggaaggaaggaaggaaggaggaggagggagggagggagggagggagggagggaggggaaggagagagagggaggaaggaagggaatcttttggtctttcatttgtctttctgttactgatttgtagttaaactcattgtggtcttagacatgctttgtatgatttctattcttttacatttgtgctttatggcacagaatgtggtccttttgggtgaatgttccatgagagcttcagaagaatatactttctggtgttcttatatggatagtctataaaagttaattagatccagctgattggtggtgctgatcagatcayctgtaatcttactgattttctccctgctttatctatcagttatggagaggagtatctctatacctatcatagtctccaagtataatacctggtttcactatttctacttttttataactttttgcctcatgttttttgacagtttgtttctagggacatacagattttggattgggatgtcttcttggagaattgactctttcattgctgaataaacctaacaatattctttatttcttcattgtttgaaatttatgtagtaattccagttttcttctcatcatgaattaatgtggcatgtctttctcaatttctttacttttaatctatctgagtctttacatttaaattgagtttcatgtacctgagatagaagtgggtctttttttaaaaaaattcattctgaccatattcttccttaattgctgcttttatatcattcacatttaaagtgattactgatatagttggtttaaaatctaacatttttgtagcttgcatgttgcttacttcttgtattaaagattttacattattaattatcgttagcttaaatttctcatcttataacttcaacaactgtgtcatatgttaagtctggctctgatatttgtctcttcatgctgtctttttattgtgttttggcatgtattgtaattttgtgttaaaaatcagacatatattgggttataggaactaagataaataggactctagtgagaatttagtttaagctgtctaggaagtaagctgtgcttaaggttttttgtagctggaggttccagaggcttcatataactctaatattgttgtttatgtctcccttcttcactttggtacttcctgtctatttcttcttagaaagtctgcatcttgtagctctttaatttgtaatccactgttattatattaaagtcctgtttgtgtgccagtagggtgggtgtggtgagattatttatattcttataattaaatcccagtcttatattcggcctttgtctctgggatatgactttcacccagaggcaagtaggacttttctgattatctaaaaatgtcctccttgaatgatcaaccatgtaccagattgactatagatctgtttggccatagagataacataaaataaacaacaaaatgtgaagaataagtgacagatctaacattttgaggagttcaagttttcttccattgcaaggagtaagacataggtaggtacagcccacacacttagagtttgaagttgctatgaaatcaaaagctcagttttctgtgtttggctcctgtatttgtttcctaggacttctatagcaggtaccatgcatgaattgggttgcttagcacaacatttactgtcttacagttccaaaagctagaaatccaaaattaaggtattgtcaaggccacgatccctctgaaacctgtatggtagaatccttccttgcctcttggcttctggtggtagtggccatcaatccttggcatattttagctkgtataatgtccctccaatctcttcctctgttatctaaatcttcacacggccatcttccccttttatacatcagtcttattatatgtagtactcatcataatggccttgtcttaatccgattacatctccaaagatcttcctcccaaataagataacattctcagatacgaggggttaggacttcaacatgtgcaatttggggaacaccactgaaataacaactccctttttgttatttctctggtccgtccttcctatctgttcaatgtcgtaaaataatgttgcagtagcctctaggtgagaagccttctgttcctactctggaaagacgttgtaataggagatgaattctcaaagctctaaaagttctaaaagacatgagctacacaggatggttgactttggcagtctctcgcccagaccttagaaaaaaatacccactttggctaagcccaagggtaagagaccaagaaatagtctgagacaaaagaaaaggcaacttttcacaattcaaataatatccagctcagttgactataatagggaggagttctctaggtcttagggccaaagctgtacataatataagggtatttttttccttctacattcattcattagagataatggttccagttaaatgaaaaactctgcctttctgcttaaactttgataatttcagatggacgaaggtagacctgaattagagttagcttgtaatagtaaaacagagttgaatggctatatataagaagtaggacaagtttgaagttacctggagaaatctaggagaaacatggtgaagagaaaaactgacagaggggtggggggggaggagagaatagaggagctattaagatgtatgagactgaggcactatgtaaattgcagtaaaatttccctgatggtaggaaggaaaagaaagtttttatatgttgttatctctgttcttggtagattaaatgatctccacccacgatgcacacaacctaatgcccagtacatggcaaaagagacctttcagatgtgattaaatcgaggatcttgagcatggagattatctttaattatatggtgagcccaatgtaatagcaaggatcctaataggagagaagccagaagatcaaagcaagaaaaagcagatggaataatggaagcagaagtctgagcgattctctgaatatagagaaatgatccatgatcccatctctagaagctgacaaaggcaagtaaacacattcttctctgcagcctccagaagaaaccagacgtgctgacactttgatgttagtgagatttctttctgacctcaagggctgtaaaaaatctgttttgttttgaaccactaagcttgtgtcagtttgctatagcaacgataaaaaactaatacaatcaggcatgccaaaatgttgaatttgacttttttttctgttgctgaaaggtacaccactcctctgtgcccttccactccagtcaaatttgtgaactttaacataccagcacatattttgtatgagtatggttggtgtgtatatgcatatgtggcaactgacgaagaggctggggtgcattactttatcagtgttacacagaatggaaaaggcaatgtgcagggaggagctctgagacggaggtgagcctaaatgcataagaccccatcaacagcccagaagttaaggggaggcctttgtgaatctggtgccaggataaaatcctgtctagaggtgcactgcacaacctctctctaaaagacatatttaacagagagttctcatggcaaaaaataaaatctaatggtgaaaggggcaagaatcgatggggtgatgattttcagctacatggaaactttcatgttttcatagatactgtttgctgaaaaaaattttgcagtaggaaataaatagatttcatggactgattgactgatgtacacaaacataaacttctcttaatcaaaggcaactaattatctcgagatttaaaaaatcccaaaatctatttgcgccttgtataatacctgtcttttagaattctgttgttcagaaacaaagtatctctccgaaaaaaacaaattctgttgtaatacagtgctacaaatggatacacatttaggtgggaacttatacacactggaaaagggcttcagaaattatatgtttaatataattctaagttatctaaaacagttaatgctattttaattaccagagcagttgagggtggagattttagtaccatggtgggatacagcctaaaggattcagaataagctgaattctatattacaatcatgaacaaaagacaaatgtttcaatgtatagaaaaatgattggaagttaattttggggactttgcacttatttgggtaaaacataagctttatctcactgaatatgaatatgtataaagaatatttcttgtgcatctgggatgaactacagactctatataatgacaccagtggtttagtgctaatctctttggtgcctagttcacatctctcatttatggttgtttcctctaatggctagcacattgtaggctcaacaatttaataattatttataaaaataagtgaagaaattataattatgagagatcagtgttttataatttttataacaaattcattttcccctgtatttagaatagtttatgattacacattttgctttgagtaaaggtgccatctgtaaatatacaggaatactattgaattaacctctatattaatttcctattgctgctctaacaaattaactggagtgtagtagcttaaaacaacacaaatgtattctcttacagtctagacggcaggagtacaaaatgagtctcactggactgagataaaggtattaacggggtgatattctttctggaggatctagagggaaatccattttctcaccttttccaccttctagaggccatctgcattccttagcttgcggccatttttaccttcaaagccagtagcatattattctcaagtctctctctgactctgaccttctgcctctatcctataaagacccttcgcattacattgggcctgcccagataatctaggataacgtccttatctcaaggtcagttgattagaaaccttatttctctataccaccttaattctcccttgccatgtaatataatatattcaaaacttctagggattacatcatagacatttttgrgggaaaaattattctgcataccacaacttctcaaatttctcaaactctctttcctgggaactgaatcttagtactgatccaatcacccttacacacctctcacacacatggttacagttatagggctcctggaacacatgctcatataacatgacactcttactccaaccctactcatagaccacagttgactgaaccagataaagatgggcttctgacaccatttgtgtgaatgtttgtttcctaaataatttaaagctgggaatagaattccaatttcattttgactgaatgatacagacatgcagaatgtcacggaggaaaaaatctacccaagctgtaccagccccaagttccagatcactgctgagactcggttgcaatattgaccttcagctccaggagacatctagtatacttgtaataattcccctgttttgcctatgctaattagaatatgctctttttacaacaaaaagattgtattcaataacatttatacaatattgttattactaagaggtactttataaatgactgaatatataaatgaaaatattaagtgaaataatgtgttcaacatcatataatggttcacagcaaatgccaaggcaagaagctagttctcttgcctttcagtgcaatgctgtctcctcttccttgtaaaagtactaggtagaagtaaacatcagcctaaggtcaatgctacatttggatacaatccacccatgggtacttaaatgatcaagaaaccaataaaaattatttggaagcaactctacattatatttaaaatatagcaatttttcatctaggagagtactatttctttcaaaaatacgtttaaaaatttatcttccaagaatttgttcaggaaaaatagctattggtacttggcttattacctgggtgatgaaatagtctgtacaacaaacccctgtgacatgattttacctacataacaaacctgcacatacacccctgaagctaaagtaaaagtttaaaaaaggaaaagatcaagctataaactgtacatatgacagatcttaactttgaaaatacagttattcaaaaataaatggatatttacaaaaaaataattattcagtagttaagttacatgtgaacatgtaatcaaaacctatttgtaaagaaactctgttatttctctcctcttacaaatgtttcatatgtgcccctcctgtcacacggcactcatcgattctgtggtctattcaccacagaatatcaccactaccagtgacagccaggatttttgttccttcatttccttagggctatgaaaaaaaggtgccacatacataaggtttttaacatatatccacaagtagaagtggcatggtatagtgaattttgtaatgtgttcaaccatttttagtaacctttaaatataacacaaacacacatatacatttttgcactgcacatatatacatacacatagacaaaaacactagaaggaggtacaccaaaattcaaattgttattatctttgggcaatgagattacaaattaccatgacggtttgtttccttctttatatttttctgtattttgttgcatctacaaacgaacatgcatttcttacataatagtaaacagtaaattttataaagataaaaaacaaacaaaacctaaaaaatggttattgtcaaacaattgttcacttcttctaaatggctttctaatctattcagtatatcccctttccacactgctaacctggagcagatggctcaataccccccacctcaatgtaaaggtaattcctggaactgtggcgaggcccagcagtttgctttccatgtcactacctgcacagtgagacacttatttgattcagagaaatggcagattatttataattttcattgtttttatagtattcttaagataaatcttagtgaagaattcctcatctataaccaagaattctgagtattgaatgtataggaaaactaaaatatgtgggaaaataaagtgtaagaaaacatactggttttacagttggttttgatccacagtgcattgaatttccataatacgccaatgtacaacaagtattcttccaataaaaaacttacattgcagtaattatctactctgtcgctattaaggctcttctaccaacatcacttaatgaatcttcccgtacagtctatgataataatacaaatttaaattcaacaaatatgatatgcaacagcagcaatttgcagaaggagtgggagaaaatctaatttagagcagattcctgccttcaaagaagtgacattctaataggtgatacatggacaaatgggaatgattgccagtacatgtttgagcttgtaaagtacaatacatagggctaaactgaaatctataaaatgggggcaatggcctggacaagtgcttttcaaactattacgaagatccttaatttttttttaactcaaaatgtggcagggccatagaaaaatatttggggaaattgaatcaactcgaaatgtgacagggccatagagaaatacttggagaaattgaatcaactgggctctaatagaaagctgtatataagaagtcatatagctgacatattaccaaagaactatggggacagcaaacatcaaaatatcaactccagatatagatactggtgaatgttatagagaacatgtcacatgagtctggtcttggaaaaagggmatttcaattggaaaagatcgagaaaaagagcattccaagttgaaagaatcacatgaataaagttgagatatgaaagttcatgcacattttgagaatgtgaagttagtgtcacttagagtgtgaacatatcagaaacagagtagtaaagacaagactggaaatgtcaaggaccagcatgcatggtcatagttgtgtttgaaagtttatttgggaatcattttatccagacttagagctttaaatttcatccagatgtttatgactcctaaatgtgtatctccagtactatcctttttcataacttccagaatcatctaaccaacttccccataagcatctccacttgggtgtctaataagtttccttaaataacatgtccaaaaatcaagaacttgttcttccctcggtctttactaatttgctaaatgacaactctaggcacctaattactcgtatgaaaaacctgagtgttgtgtgatattcttatctcccatattaaatccatccttcatccatgtaaacgctaactttaaatattctaagtctatccatttctcaccacctcattttctgaatgatcatcatctctcaaatggactacagtaatagtctgacaggtttctcggtttccaatctctcatctagcatagactagactagactagactagatgttttgtatgaaatattttcacttccatctccttcacctccatgaaaagcatgcattttctgactcattggccaatggaatattaggaaatgtgacagaaggagggcctgaaatgagtgtgtttggtattgtcctcttgtgcttctgctatttccatgataggactatgctttgaatagctgctagttcaaagaagatgacagacatggagtatacttgggttcaacccacagccaattcacatgcttaaggaagacacaatgctaaattccatatgctcctgagttttggagtgggttgtttctcagtattattgtatcaatcacttattgatatagactccaacattctgtaaaccacacagccaccctttaatgcttaaatcagactatggcactccactgctatcaacactataataactttatacgtgcttagaataaaattccatatctatactactgtctctaagcaccttgcctctggttcctgactaccttttattcacttcatgtcagccacgtggattacaccaagtaggctcacatctaaggggatttacagttccaattccttctgtcctgtatatttttcccaggaatattcatatgatttactcttttactttattaaaatgttacctcttcagatataccttaactgactaaccaatctaaatatttccctcactaacacaccaaggaaccacttgttcacccgctttattttttcttcctagcacttaacactgttttaaaatatataatatatttggctgttgcttaattttaggtctcctccaatcaaaagaaagctccttgagaagttgttctgtcctgttaactgttatatctccagtgactaaaagctgtctgggaaatagtaatcactcattgaatatctgtcagataggaaagaaggaagagaacattttataggagatattggtaagaaaaatatatatgtaattgtaaaggttaagaagttattacaatagttttgtgaaggattctagataagggcagaaaaactggaaagaagggagactatgagatattttagaggtagaatccatgaaatttagtggttgactgaacgccacaatcctgcagcaaagayatatcaaatrtaattatgagaggtcaagttaaggaatctgcaaaggtaattgtgacattcagacatgaactcacgtcagcaatgtacctgaacaccaactstatgccatatagtgtgctaagtctatataagcagttgacaacttttagacaggaatcatgtctgatttattatttatttatttatttgagatggagtcttgctctgttgcccaggctggagtgcaacggtgcaatctcggctcattgcacccggattcaagtgattctcctgccttagcctcctgagtagctggcattacaggcatctgccaccacgcccggctaatttttgtatttttagtagagatgggttttcaccatgttgtccaggctggtctcgaactcctgacctcaggtgctccgtcctcctcagcctcccaaagtgctgggattatagcggtgagccaccgcgccagccctatggctgatttatctttgtgctccagataaatcagacatggctcctgtctaaaagttgttaactgcttatataaaaaggcagaatttcattgaaatgtgctgaagtgctatgatagatatttgcacacgggggcaacacacttccacacataagaatgcagatagaaaacataggaacagaagcaggtttgcaggaaaatataagtttggctctagttatgatggatttgaaactcaaaatgaagatgccagcagttcacattatctgaaatttgagggcaaggatttggttagatatctggaatcatcagagctattaacaaaggagtgattggtttggaggagatcatctcaggagagtacatgaacaaaagagcagtgacctaacaacagaactctgggatgctaaatagctaggagatgagcagagaaatagaggactgtgaaggagattagatagaagatgtcagatgggaaaggaaataagagagggaagtttggctggagccaaaagaaaaaccaatttcaagcaggaagaaattattgagattggaagacatcttctagaaggtcattcattttatagttgaactaaactaacaataacatgacctatccatacttctatgtatcccttcatcaactcatttattcaataagtatttattgagcacctacaattatgcatcaagtaggatgctttattctgataaatataaaggtctttccctcatgtggtctttagtctagctagggaaatatgyattaacaakttatttaaaaaatacatayatagggtgatgtcaccacaatggtgcagtgtaactactggccctctttgctccccccacacacaaagaaaaacatatatagacagctttcaaaagccaaaatagctcagagaggacttgagggcccattaaagaatctggagcaacacagtggagcaaaataaaacccagagattatccacatagaaaggattgctagtgagatcagcatatctgaggcaycagatgactgctaggagcaaagaaaggcagaaactatcaatatcagccaagtgacaagaatcatgttggtcaccattggccttctctgcagagaacacatgcatctcctgccactgaggtaagcaatatccattcccactggagaaccccatataaggagaaacagctacacagccctccccacccaagaagcagtttctcttgatcagccttgggaaaggatcctccacctcttccatccctaaccccagagccatgttctaacaaaaattgttaggacaaacaaatgaattcagtaaagttgaagaacatgaaatcaacatacaaaatcagtactatttctatgcactaacaacaaactattcaaaaaaaattttatctaatttcaatagatacaaaaaaattttaaacccaggaataaatttgaccaaaggggaaaaagatctgaacactgaaaactacaaaatgttgataaaagaaattgaagaagacatgaataaatggatagatatccagtgttcatggattagaattattaatagtgttaaaatgttaatactacccaaagtgatctacagattcaatcaatatcaaaattccaatctcatttttaacagaaatagaaaagacaatcctaaaatttgtatggaaccccaaaatatccggaatagccaaagcaaccttgagcaaaaagaacaaagctggaggcatcacactacctgacttcaaaatatacaacaaaactatgccaatcaaaacatcatggtacctgcataaaacagacacacagactaatgggacaaaatatagaaattagaagaaatatccatgtatatatggtcaattgatttttgaataaggcaataagaaaagaaagaacagttccttcaataaatgttggtgagaaaactagatatccacacacttaagaattatattagacccacatctctatatacaataatcaactcaaaattgattaaggacttaaatctaattaccacaaactttaaaactactagccaaaaacataggagaaaaacttcatgacattattctgggtaaagtttgttttcaagatgatgccaaaagcacaggcaactaaagcaaaaatatacaaatgggattacattaaaccaaaaaccttctatgtagctagagaaacaataagcagagtaaggagacaacctacagaatgggagaatatgtttgcaaaccataatctgataaaaggttaatattcacaatatataagaaattcaacccagccaaaacaaaaatagcccaattaaaaataggccaaagacctcaaagaagacatacaaatagcaaaaaagtgtataaaaacatgcttaacatcattagtcatcagagaaatgcaaacaaaaccacaacgagatattataaccgttagaatggctatgatcaaaaagacaaaagataacaagtggtggcgtggatgyggacagatagtaacccttgaacattgttggtgaaaatgtaaattagtagagccataataaaaaaactgtaaaggttcctcgaataaataaaaatmgaactaccatatgatccagtaatttcactactaagtaaatattcacatgatattaaatcagtatgttgaaagatacctgcaatcccttgtttttgcagcattattcagaattgccaagatactaaatcaacctaagtttccatcaacacgtgaatggataaaaaactgtggtatatatacatactagaatattttttctgcctttaaaaggaaggaaattctgtcatttgcacctgtgtggttgaacctgaagcacattacgttaagtaaaataatccaggacagaagggaaaatatcaaatgatttcacttatatgtagattataaaaaagtcaaactcatagaaacagagagtaaagtgcttgttaacagagcttgagggtaggtggattaggaagatattggtcaaaggacacaaaatttcagttagacagaaggataaactcaagaacttatccttctaatttcagttagagctttatctttctgtctaaaattttgtggtgagtacagttaataaaaatrtatcttatatatgaaaattgctatgagaagagtgggcattaagtactctcagcatgaaaaaaataataagtatgtgaggtaataatacattaattagcttgatttagccatctcacactgcatacatatatcaaaacatcatgctgtatatcatagtatataagatgttatttgtcaattgaaaactaaatttaaaaaacatatwtaattacaaatagtgatgattcacgtggatgaagtagagagtgctgtaagaatatcctctaaaggggtctgctctagactggggtaccaggaatggcctactgcaataaactgaatgcttacaaacccccaaatttacatctgaatatcctaactcccaaggtgatggtattaggagttggggctttggagacatgactagattgtgagggcagagttatctataaggcaggtgttgtctatgagaaagtgagccctcactgggcacagaattgccaggacttttatctttgactttccagcctccaaacctatgagaaatcgatgtttgttgtttataagccatacagtttatcatattttcttatagcacccctaacagactgatatggtttggctctgtgttctcacccaaatctcacgttgaattgcaattcccattgttggggaaaagacctggtaggaggtgattagatcatgggggcacattttccccttgttgtttttgtgatagtgagtgggttctcataaaatatggttggatagaagtgcgtagcacatctcctttcactatctctccctcctgatccagccatgtaggacatgccagcttccccttccccttccaccataattgtaagtttcctgaggcctccccagccatgcttcctgtacagcctgcagaaccatgagccaattaaagctcttttcttcataaagtacccagtttcaggtagttatttatagtagtgtgagaatggactaatatagaaagttggtatcagagaagtgtggcattgctgtaaagataactgaaaatgtggaagcaactttggaactcggtaacagttcgaggctgaaacagtttggagggttcggaaggagaaaggaagatgagggaaagttgagaacttcctagagacttgttgaattgttgtgaccaaaatgctgatagtgatatggacaatgaagtacaggctgaggtggtctcagatggagaagacgaacttgttgggaactaaagtaaatgtgactcttgttatgctttagcaaagagactggtggcattttgcccctgctctagagatctgtggaactttgaatttgagactgatgatttagggtatctggcagaagaaatttctaagcagcaaagtgttcaggaagtgatctggctgcttctaaaagcctaaggtaatttacataaacagagaaatgacctgaaactggaacttatatttaaaaaggaagtggagcataaaattttggaaaatttgaggctgaccatgcagtaaaacagcaaaactgattttctggggagaaattcaagcctgctgcagaaatttgcatgagtaacgaggatccaaatggtaatagctaagacaatggggaraatgcctccagggcatttcagagacagttcaacagcccctaccatcacagatcttgaggcctaggagggaaaaacggtttcatgggccaggcctggggccccactactctgtgcagcctcaggacatggtgctctgtatcccagctgctccrtctccagcagtcactaaaagggggcaatgtacagcttgggccattgcttcagagtgtgccagcgccaagccttagtggtttccacatagtgttggacctgaaggtgcacagaaggcaggagttcaggcttgacagcctctgcctagatttcacaggatgtatggaaatgcttggttgtccaggcagaagtctgctgcaggggcagagccctcatagagaaactttactaggacaatgtggaggaaaaatgtggatttggagcccccacacagagtctccactggggcactgcatagtggagctatgagaactagagggccaccatcctccagaccccagaatggtagatcaaccaacagcttgcaccatgcacctggaaaagctgcaagcactcaatgtcagcccttgaaaacagctgcaggggctgtaccctccaaagcctcagggatggagttgcacaagtcctttggcacccccgccccttgcaccactgcagcctggaagcaagaaatkgagtcaaaggagagtattttgaagttttaagatttaatgactgccctgttggtttttgaacttgcatggggcccatagcctytttgttttgaccaatttctcccatttggaatggaagcagttacccaatgcctttacccccattgtttctaggaagtaactaacttgttttttatttcacgtgctcataggtggaagggacttgtctgtctcagatgaggctttggacttggacttttgagttaatgctggaatgagttaagactttgggrggctgttaggaagtcatgattgtgtttggaaatgtgagaaggacatgagatttgggaggtgccaggggtggaatgatatggtttgtctctgtgtctccacccaaatctcgtgtcaaatcgtaattctcaatttttggagagggacctgatgggaggtgattggatcmtggggcagattttccccttctggtgatagtgagtgagttctcatgagatctggttgtttaaaagtgtgtagcacctcccgcctttttctcttcctcctgctccagcttccccttcgccttctatcataattgtaagtttcctgaggactccccagccatgcttcctacacagtctgtggaaggatgagccaagtaaaccttttttcttcataaagtaccctgtcttaagtagttccttatagcagtgtgagaacagactaagacacagactaagacacctcccaatgaaagtgatattaaagttggtgactaaagaatgaattaggatttagcaaggtaaaagtagggtagagtgaggggacaattccaagcatattgaacagcatatgcaaaggccctgaggcaagaaatccttcaaatgtgatctaataactyagagaagtcgaagtatttggacagagaaagagaaaagaagcaagggagtgagtagaacaagatgagactgataagacttgcaggttcctaatcattcaaggtctggcctttgggttgagcaagttttacagtacattaaaggcaatggggagtcttttaagagttttaagcagaatactgttataatccgattggtgttttaaaattttaccatggttaaagtatacagaatgcattatcagctgcctcggttaaaacagaggtgtggaggaacagctgcaggtttgactctttgaatcttttatgtcaaygagaaatgcaagtaatcaaataactgaagatctaacatgctaatgatctcaagggattatgcctctcccctaaagcccatctataatatcttgaaaattcagattttaaagaggtggatgcagggagaaggtggtgtcagagctacttctcaggcttctagcacgagtaatatgggggcgggagagagggggatgtcatttgctgaaatgggcaagactgtgagaagtaggttttgaggagaaatcaattaggtagttgcatatgtaggtttttagcttacatgagaggtctgggctgtagacaatggtagataaaacagataaaataaattcttatatatgtacttgaactgcttctgaaatagagacttatgttacctgcccattgttattccagacattttttgtgacactttgatcttatttcatgaacttgattccaggaacgacaattaactagctatgtgactttgaagaaattacttaacctcatgggagcctcagcctggcatacaacaaattataatagaattgttgaaggcaagagcatatttgtgttccagtatcctctgtaccacttattaatttatgacacttaggtcatttaaattatctttgcctccgtttcttcatctataaaataaggataaggacatgatttactctaaggcttttttgagggtaaataaattataatctacgtaaaactaatttttgtcacaatgcctgaaacatggtgagccttaaataaatgtgttatcacagcagttgtaggacacagtcaatagatgtgtcctcacttcctttcttccttcaccttcttttccaaacactttaattcaatcaatttttgaccacttattatgttcaccaccttttctttcttcagttagaacacattaagatatgagaatttagtgctcaccttgtcgctaccagaatcaaatatgcaataaaaatagcagtgcaaagagagaacgaacgaaaagcactttattatcttttctctagtattggtaaaaacagacagcagttctggggaaacattgggttctgtcttctaaactcttgttgcaaaaaataatatttctcctgtgtgggtatccttactgccaaaaagatgaataaatacacacacacaatactatcaagagttaaataatttcacctattgaggccatctcttttcagcttaattgccttaaayttggcattatattgcctggttcttcctattagatactgtttatcatgttaccttatttcttactattatctgtgttgccagagcccagagtaatatgatgacaaggtaaatagaagtctgcagccagtcatgtaggttctgaacacactacaactgagggcaagcagggaagcaagcatgagaggcacggaaccagtgagaaaatcaatgggtaaagaatcattgaggataaatgagaaagtaaatgtgactcaccaacattaaggaaatcacaaggctgtcctaaaactagggccaggctcctctctcaagaaggaattcttgtttgttgcctgttggaataaaaacaagtcctgagtaatgcacagtctgtgtgtcagataagtgaatgcatgttttgtctctgcttggaaagagtaaggggttcagagttgaaggtagatcctgaaacccaaagaactccaggtagcaacagcaggcagcctgagtctgtatttttcctcacacaatccatcaccattcttttcctgtccttatctggaattcttggaatagactagttggcagaatactaacaaatctgctaatctttctarctatgtgtttttcttttgcattataaaaataacactgctctggctctacccctgagacatccagtggtccataccaataccctgatctccaatgattgttgtgagatatgatgcccagttttcgtcaccctcagtacttgagaactcttaatttctatctgtctaacgaggcttctgacatatcacctgttctctttgcacttgtcgaccagtactgatttacaacttgtttctgattctacatgcctagattgtttctcaagttttgttttatcattagtgtttcaactcacacaatagactatgcaaaccatagtgccattagacagaaaatgatgagagacagataaatcagaaagaaagtattgaaaatcaccaacgacaaaagcaagagaggaagtttgcatcaaatcctcttttctttaaacttgtatacaaatatgaaattatggcatctagaaaagttgtgatgctgctaatacttattaaaaataaatacatagacttgataccacatagtgttttgttcagtgagatattcggagtagaataaactagatttacttgtttctgtggtagagactggccagttcttcaccagtctctaccactgtattttttctttttcctacatttcccagcttcccgtggagtaaattgtagtaatatgactgaatactagccaactgattatgagaggcagtcatgtgcaatccttacaggactgattcataaaactgttcatacttgattctctaagatctttctcttggttgaagtagaggggcctgatgacctcgaaaaccatgtattgaagatggagcctccatgagatcgagatattctaggaccgtgaatcaccaactgacagagaaccacttgctgatcaggaacattcattttgaaatttgtgtgtgagaaaaaaggctcctataaggtttgagtccttgtatatttttggatttgtttattaccaaagctaatatcaacttacataatagagtaaccaaaaacaatcgctagtatttattgagctcctatataaaacaaactctataaatgagaagtggctgctgctgctagtaaataggatagraattggatttaaaacactaatgtttttcactacataccyactgaaacatgtctcatgtagwttagaaagagtgcactaygtatatttatttatttttccakttttaccgaagtataattgacaagtaaaatcgtatgtattttaagtgtacaacaggaggatttgatgtatgtacacattgtgaaatgattgccacagtcaagctaattaacacaaccatcaccttacatagctgttattgtgtttgtgtgtgtgtggtaagaacatttaagatctactgtcttagtaaatttcaagtgtacaacacagttttgttaactatagtcaccatcctgtagattagaaccccagaatttactcatcttataactaaaactgtgtaccctttgactaacatctcccctggcccctggtaaccaccattctactctctgcgaccatgaaatagatttgtgaaaggaaaatcaatctcaggacccccagattagaaagccgaaaggaacagtcaagctgggaactgcttagggcaaacctgccttccattctattcctaaaataaatagctactaagataaaaaaaaaaaagctacatatctcacacacaatttatccataaggaaattccttgtagacaaaggacagacaaaactcaaagtcatccatctgctcactgagataaatgcatctctgattgcttcctttggaaaasctagtaaaagactcaaaagaatgcaacaatttgtctcttatctacctgtgacttggaagccccctccctgctttgagtttcctacctttctggaccaaaccgttgtacattttgcacatgttgattgacgtctcatatctctctaaaatgtataaagccaagctgtgctccaatcaccttgggcacatgtcaccaggacctcctgaggctgcatcatacctgcacatccttaaccttggtaaaataaactttctaaattaactgagacctgtctcagatatttggggttcacatttggtgaccatgaagggactctgagtgaaggtggccctgatctttgacaaatcatcggtgcttggtaccagcttgagatatcttcatgggtcaaacarataggacatttggctgacgcctgggagcccccgctccagagaatccctgatctcccaaaatttggtcaagatctaaagttaatttttctgaacaacttatttttctgccatttacttgcttccaacaaggaaggcgttttcctgcttccatgacgatggaaggcaggtaactccattctggagtttgagttcacttctgacaggcaatgtgagttttttcctgcgtctaggatggtagagagcagtcttcagcctgagacctatccctaggtaagtagctaaattgtggtttcatcttggctaaagttacaattaaagccagccggtcttaatttctccttaccattacagtgctcagttgttgggttkttgttgttgttgttgttgttgttgttgtttctggcctttctcctgtcagacttgaccaactgtacctgacttggtctaatctgaatgagaattccaaattatgagaaacaagtcctctctgagaaaaacaaaacaaaaccatgagcttggtttctgcgtttgattcctgtctttaaaaaaaattcttatttagtttactattcttccactcaattcctcctttcccctttgccattttcagtaccaagataaatctagagaagatttctaatgactctaacccctttaagaactcagaactaaggcaccactcacatcttcttggggtgttctgttttctttgcggggtttcaagagtcatgggcagattcttaggtctaaagttctgctctcttgtactgcattacatgaactctttggttttttggggtaccagagattatcttgtactgtgagaggatttgacctcagcatgtgtaatggtgtaagagagctacaaagttaaaagtggctaaggacagtttacaggaattggtcttatctgtttttgtttgtctgtttgtttgtttgttcctcctaggaagctgctgtttaggatcctaattttaattcctaggtacattataaagagtcttctccattctctttcctcccaaaattaatctcaatttggcttgtgtgcatatttgcatgaggaactaaactgtcgtttgcatagataaaggagagactgagtttcctcagctccgaagcgaaagggcattttgctcttctcagctgaaagtcacccgtgggtgacagggggccaagtgatagtgtctggggggctgtgcatttctgagacacagggccagaaattaaaactattcaacttctcaaggcccaggggctatcgcagaatacgtgggtgcatgagattgtaagagccaattttgaaaaataaaataagttcagtttctctataacttaacaattaatgtcaaaggcaggccagcatatgggcacctgcatttgattaacaaggtttatttggagcattaacccactccttattaaaggttaaaaaggcttatgaaaattatatcttgtagtcaagatgattaaaattttatagattgtttataaaatttgggaaaacaaatttaattggcttcgtgctgtttttattagggcttattgttgggggaattaagtctcctctcccaaagaataaaggttttcactgtttttaaaaatctttgagttatcactttggctaaatgaatgacttattttacaatgattgttgattcaattttgtgatatcaagcattttatacattttatatttgacaaacttcccaaagtcaaattctaactttgatcctcattaattttttgatattggtctcttgaagtccaaaagagacatattcggcttgtttgagataataaaatcatacaggaagtattgtcaaatatgaaacagtgtttacccttctttggattatatttatataaatgtgttattagtatgtgttccagaactatatgaaattcttttgattctgatatgttttagcatgttattatgagtaattatgattattatgtaaaattgttgtatggcacagaagtaaccacgtttccttgtcaattgtgtttttaactatgactgttttaaaacttgtgccatccacaattgttttacttttatccttttcaaaatgtggttttgtaatcagcataggactctgacagatgctcctgaatgcatgttttggagattgtgatgctagaatagagaaaaagtcttcaaaatctaccagggagagctgaaatgtccatgaatatcaagcagaatgtgagttaactgcttggactcaactaacagaatattgaaatactccttttatgatttttgcttaaaacgttgctgatcctttctctgttttccagagccaagaaaaattttcttttgagctatttacagcttttaacaattgagtaaactatactcctaaaaacgaaatttggagcatatttctctctacctgattcctccaaaatttggaaactagttgtgagtattcttcacttatggcaatgttatttgcataagtacaaattcttattgtttctgttttgttttgtaacaggacacaattggagacactggtattttaccagtgttttgactggaatagcatgctatcagatacagactcctttatggaattaaagttgacttttagagccaataaaagccccttgggaaagctaacctcataccttgtccagacagtcccagtacaggttcctgaccggtagtaagtaaagaatgtcactttctgacagactcaggagccccagattctcttgggacctctaggtgaataattcacccaattaatacaggtatttgcaggcacaggctaagattgaggcattaaagttgaatctgagatcccttatcaaatgaagttccagcaaagccaatttttgttaaagaggagcctacatggtaaatgtttattcttgttgactttatgcaaatactctggccaaatataataagactaagacttattttgcaaatgaatttctcccataatttgtctttagtgaatatgggactgaagagaaacatcaaaataaacgattgtacacatgctcttagagtctcgtcttgcctaatgtttttcaatttttattattttctacaggttggagtgaattgtaaaatttttcctggctaaaagtctccaaaataatgttttcagttccttctttccattcattttttccctatttttttctgatttgaaataactaaaaatgaagctgtattttcttaaagccctgcaaactgaagccagataacttaaacttcagaagaaaataacagcaacctatttacatacataagccactttcctactttcctactgatgtatagatttcagagtaataggcctatatagattttccaaaattggtattctttttttgtttgttgttgcttttcttccttacccccactattttttctctgtaggacatgagactttacaatctgctaaaaatgagctttcctaataacatgggacctacccatctaagaataaaccattcttgctatatcasgcaaaacctgagaccagagactcatttttttctaaaatcctgtctccagaatattttaaaacgaaaagtgtgggaaatgagaaagaaaaataaatctcaagaacctcaaatccctaagccaaagggaaaagtcaagctgggaactacttatggcaaatcggtctaccattctattcctaaatattcctaaaatagattcctaaaatctattcctaaaatagatacctgctaagataaaaaaaaggtacatacctccttcgcaatttgtctataagaaaattctttgtggacaaaggacagacagaactcaaagtcatccctctgctcactgagataaatgaatatctgatagcttcttttggaaagactaatcagaaactcagaagaatgcaacccttttcctcttatctaccrattacctggaagccccctccctgctttgagttctcccgcctttctggactgaaccaatgtacatcttacatatattgattgatgtctcatgtctccctaaaatgtacaaaaccaagctgttcccagacaaccttggacacgtgtcatcaggaccgactgaggctgtttcatgggcacattcttaaccttggtaaattaagctttctaaattgactgagacctgtctcagatatttgaggttcacaggctttttcagattgtctattttagagagatcatacagtatgtgcttttctgtgtctagcttacattacttagcataatgttctccaggctcattcatgttgtggaagatggcagaattttcttctttttaaatgctgaataataatattttattgtgtatgtgtgtatatgtatccgttcatccatgcacaggcacttaggttgtttccatatcttggctattgtaaataatgctgtaatgaacatgggaattcagatatctctttcacatactgatttcattgccattaaatattcacctaaatgtagaaatgctgtgtcatatggtagttgtatttttaacttttagaggaaccaccatactgttttccataacaacattactaatttacattccaaccagcagtgtacaagggttcccttttctcaacaccctcaccaacaattattgtctcttgcctcttgataacagccatcccgacaggtgtggggatatctcattgtggttttgacttgcaaatccctgatgattagcgatgctgaatatcttttcatataactgttggtcgttttgatatctttttttggaaaagtgtctattcagattctttgcccactgtttaattaggccatttgagatttcttttttgtaaatattaagttatacaagttacttttacattttgcatattaattcttcatattatattataatttgaatataatacacagtatgtaaatatttcatcctgcttcacaagttgcctttttattttattgattattttcttcgctgtgcaggaagtgcagcaaagtctcagtttgatgtagtctcaatatttttatttttgttgcctttgctttagcagtcatattaaagtcatattaaagaaaaaaatcattgccaagaccaatgtcaaggagctttttcctactagttttacagttttagatcttatgtttaagtccttaattaatttcaagttaatttttgtgtattgtgtaagacaaggctccaatttcactcttttgtatgaggatatcgagttttcccaacactatatattaaaaagattctcctttccccattgtgtgtaattcctggaaaagattagttgaccgtacatgtgtgggttatgtaggggatttctattctcttccattagtctatgtgcctgtttttatgccaggaccatgatgctttgattactaaaactttgtagtagattttaaactcaggtagtgtgatgcctccagctttgttcctcttgctcaagattgttttggctatttgaggtctttcataattccagtaaatttcagcattttttctatttctgtaaaaaatgccattgaaattttgataaggattgcatttaatctgtagatcacttttgtcagacattttagcaatattaataatttcgattcatgaacaagagaaatttttcccttcattgttgtccccttcgattgttttcatccatgttttatagttttcagtgtacagggtcttttatctccttgattaaatttattcctaagttttttattttttgagctattataaatgggatgcttttcttaatttcttttttgaatagtttgttgcttgtgtatagatatgctactgatttttgtatgttgattttgtatcctgaaatgttactgaatttctttattggttctaatacttttggggggaagtctttagggttttctacgtgtaagatcattttgtctgcaaccagagacaatttcacttcaatgcctttcttatttcagtgtcttttattcttttctcttgcccaattgttctggctaggacttccaatactttcagtactctgttgaatagaagtgaaagcaagcctccttgtcttgttcctgatataagaagaaaagctttcagctttcaacatcgatcatgatggtagttatcggcttgtcatacatggcttttattatactgaagtacattttttctgtacctagtttgttgagcatttttcatgacaggatcttgaattttgtcaaatgtttttatgcatcttttcggatcatcataggacttcatcttctattctgttcattatatcacattcatagatttatatatattgaaatttcattgcatctaaggaataaatcccatttgatcatggtgcatgatccttttaatgtgctgttgaattttgtttgttagtatttcgtttagaatttttacatctaagttcatcaaggatattagtctgtaaattttttcttgcagtgtccttgtctggttttagtatgaaggtaatgctagcctcataaaatgagtttgggcatgtccccacctctttaactttttagaatagtttcagaaggaaaatacagtgtgtttgtaacaaagactggaaaccagacacccgagagaatggcttcagatacagtctgtgtaagggaacataaaacttggtttgagacagccttaaatcagtgcgattcatgcctgagtgcctgagtctgtctctctagtgacagaagccctgtattattcaaatatgtatcctcttcttctccagtaccttgttcagtgtcttgcaaatagttgatgtccaccggatgatcttacaaatgaattggtttgaatacaaagtacaaagtttggaactgtggtaagttagtttcatagctcctattttgttttttctagattcaccctcctgaaaattgtcttgtgtatgaggtcaaatctaaaaataatttttaagaaatttaaattacctcttaggtgatactttagctcatctcttatacctttctgtgcttttaaaagcagataacttaggtaaagctcttagcacaattcctagaatatgccaagcactcaataaaatggcaactgttatcattaacatcaggtttcactgtgatctctcattgatattctccttttggatatttttcctgtctagtgttggtgtttctaatgctatgatttctactgctgtgccttatcttctctaatttcattcattcacattacwtttaccagacactgaaacatactctatatgtattacctcattactcctcattaaaaatggggtttggtatatttgttctacaaatgagaaaaccaagacccataatttaagtatcttgtctaagatcacacagctttaaatgacagaactggaattcaaaaccaagtctgcccaactacaaagcgtaggctatccacagcactaataactgaattttccttttctttaaagagaaattactatcattattagctcattagttacataacatggagtagacatttaaggttggaaggaatatagtccatagtaagctggagccagcttataatagcttgcaagagtagatatcttcccagttccatgttcagtgacagcccatccacagcttgaaattatccatggtgggttggagtgtttgcactgtaaaaattatcaaatggtacacacagcacaaataaagtcttctttttctttttctttttaattttttttttttgagatggagtttcgctcttgctgcccagactggagtgcagtggcacgatctcagctcactgcaacctccgcctcatgggttcaagtgattatcctgcctcagcctaccgagtagctgggattataggcagccgccaccacaccaggctgatttttgtatttttagtagagacggggtttcaccacattggccaggctggtctcgaactcctgacctcaggtgatcctcctgccttggcctcccaaagtgctaggattacaggcatgagccactgcgcctgatctctctttctttttacgagaaaatgactggttttgtagtacagactgtttggttcataaggaaataaggttagaggaggctaatggcttatccaatgtaatagagctagtttgtggcagagatggaaacataacccaggttttctggcccccaatatataatgtaaaagctgttgctacctcctcccttatttggatagaaatcagagggagagtgggagagagttcatgaagtgtgtaataatacagagcatcatagattctgcattgtaagaaaagttgaatatcttatctagtatttcccaacagtagcttcatataagactcacctgaggcaactgtgaaaattaacattttcctggaccatctactgaatgagacactccaggtgaatctgcatgcttaatatgaatctctgcatgttgttatacagccacagattctcattcagaaatcgctttatgtagcccaattttgtattccatgtgtgaaacctctccacataattcatgcttttatcctgtatgtgtttaactctaacctctaagctttaaacagttcattcccttaagtcatttttttgtgtaaggtttgcacattacaatgtgaaacaagtttccagaaactaatgacttacagtattaaatatatatatatacaaattatgttggtatgataaaagaacttttgttcttggggactttatagtcactgtcttctttgggatgcaggaaaggattatcagaaaatttgtgtgtgtgtgtgtgtakgtgtgtrtgtgtgtgtgtgtgtgtacagaatgggagaaagggtagcctcaagaatatcctcatttcagggctctgggaggagcttggagtgctcaggggatgccccgctttggcactaagtgtgaaggcagggaatgtcccgctgaaagaagccagccgtgatcactggcagggagagcaataaaaacagagactttgttctcaaaagcttgctgaaagtataacattggaccattgagacagctcagtctctcacacacactcccactgggctttgccaaggtgcaggaaggccttgctcagcctagcacacagagaattgctccctctgaaaggaaccaagtagctcgcagacagtaataaagttcttgaaagagtgtgccaaaggaaagtttttaatctttaatttgtttacaacttaaatccagggtttatcagcaaatatgatttggaggcactcaggattaagtgggtattttttttctttcaaagtcatacgaagctcgaaggataccagcagctccaagaatatcattttctctggaattcttgactctggaaaagatatcaatgaaagacatcatagttataaagctgtaacctatagccatgaaagaaggcttccaaaatactcctggtggttaggagagctatgcacatgaccgttgtggcaaatagtatgaatttaactctggagtccctaaatccctagttttcgagatagtctaattattgaataaatgaatgtatgatctaatgaatgaatggatggaaaatagtcacctgcctgatgatagtgcctgaaaagcaaccaataagaaacaacacatccaaaatcttcacaaggaggagaaattattgattctttgatttattcatcaaaagtttaccaagcacttactatgaaccagattctgtgatgaccactgggagtatctgtctcagtagttctcagacttgaatgtgcatcagaaatacttgaagggctcattaaaacagattgctggccccacccctaaagtctctgacttattaagtctggagggatgctcaagagtatccattcctaacaattgcccaagagatgctgataggcaagggaccagacttctagaacggcaggttgttcatacgggaaggaacatgtaaatgtttataatgcatagtaataagtggtaagtgccatgaagtgtgttgggagagcacagaagaggggcactttattcagctttgggatgaggggacaaggggaagaggtcaccaaaggctttccagaagtggtgacacctcaggtgagtcttggaagttgagtgagagttcccatcaggggaggaagaattgagaagatactctggatggaagaaatagcatgtatgaaaacagagaggtgagaagtagcatggtgattttagagaactgcaagtaatttttggcaagagttggagtggataacaagtttccacttataacatctagtacaggcttgccacaaaagaggcactcaataatgtgtaaatgaatgaaatgttatagcactatgctagggactatgggaactccaggataacatgtggtcctaggctcaaccctcgagaagctgtcaaaactgttttggggaggagacatggtgctttcaaagtgaagcagtaattccccagagaccacaatgtggtagacagcagccagggaggctgcctggatcacagtgatttcttctctcttctggaaatgatacttagcctaaggtttgcagacagagtttaggttaagtgattctacctcatgccatcccagagttttctggagataggtatctgaagcaagtaggtaaatcagagtacttccctacaattatttgaaatgaaatggagaagaaaatctgaaacctcctctagtgaacagcctgtgggtatataaacagcacaggaactgtttgtcaccatgtctcccagaagaagctgagagaaagaaggttctatgccaatggaagcaaagatgagagagggacagagcactggcagcactctgagtctgagtctctgattccaaatgtccctaaggcccagctgcccttgatcttcccaccttttcttagtagattaaattcctcaagggccttccggtaaatttcccttttggcctcagccagatcaaattgaatttctgtcacttgcaatcaaatcagctgtgactgctatagtcagcaatcactcaggattcaatgcatgaaaacgacactgaaaggacctataatccatgtgctaaacctgtagtagaagtggcgtgggtgcagtgggacttgagctagcatcgggacacctgggcaggactcggccaaagaaaagtgaatggaggccctaccaaataaagagaatagcttaaaagaaagtgctgtgttagaaataaacatggtttccaatgctggsggataggcctgccggctggacaatggcttctttctggggtaagtatgaagaagcatcagatatgaaggagcttgcatgctaggctcagacgattggactttcacttgaaagtctggaaggacaaacggaagaaagtggtgtttttcaagagcatgaatctcatgacagttttttttttttttcctggggagagttctctctcagtctctctttctttctgagaagaggtgttcttacagagaatgctcatcgccagacttctcaggaattgctaggaactgggtgtgggcagcagggctcaccctgagacagtttaccctaacccagaggagccgagaatggcagtgtggaacatggccacagagagcatagcagccgccaggtgaggtagtgggcagagcactgggctgggattcagaagctctgtccttacacaagtcacttgcctcattgaaccacacttttctaatctgtaatatgggaatagtaatccccactttgtttttctcacagagtggccatacagagaattaagatcatatgtatgtaagaactttctgcattgcaaagaattggcaaaaggttgtgaatactgcagcgtgatttaactgtttatttcagaaaatctgtgacagagcttgcctaagtcatcactagtagcgtacttttattggatgggtgtggtatttcccaagcagccatctcagtttagggagactgctttccactacattttctgggcaggcccatctttgtaaggcttttctctttttttagatcagacatgctgcaattacaaattactttcaagacattttaaatcaactgggaaagtatgcacgtgccctggtccatggagaccacgtttgctcatcatgttgtctcctcattattaatcctgtcccaagatccctttctttaagcatctccttctcttttatgggagggagccctgtctcacaaccaacaatacgtttcccggagccattcatcttttctttcacgcataccacatttaacattctctcatgtctccgtcagaagagtgcactcactgcaaatccactgggtccaggcctgatgctgggagcagggcacacctgtctggcactgccaactctgccctgatttattcagagatggagctgaatgccctgaacgtcttcagccctgggaagtccttgtcaacgctgtgatctatatatgccttcagggaaacagtcaagagaccaatccaaatcaggtgtcttccttcatacggatgacgggagagcggtgctcaagctacaggatggctacagtacctttgagtgttacgggaatgtatggagttctgttgctaccacagtttactttctgcatatttctctacactgtgtcattggcaaggtttccgactttgtcatgctcttcaagctttacagcgtgtaatagaagagacatttcaattgtaatgtaaaaaagatactttgtcgcttttatcttcactgattcaagtcaacacatgtccatgtccagaaacttttctattatcgagcctgcattttaataggatgactccgaaaagtacccattttcctaattatttcagaaytacgtggacagtaattaccatcttccattagcagcactagtggtggttaggacaaaattcaaatgcatccagcaagtgctttacactaatatgtctgcttcattaacttcaatcaaaagacagcagtggctcctcatagcagtaactttgctttgatacattctcatcaaatattgatctgaatagtgtgtaggagttctctgtcaggctgtgtgaaatttatttactgaatatattatttctatccccaaactgccagttgctatctcagaaaatgtttttttcatgttaaaagtttattaacattaagaaatcactaaatttttggccattaaaacgtgttcagaaaaaggtttttagtgcaaaatctgcaacaggaaaggagaggattcaaaattttatcagatgatagataggtttgcttttccagttggtccgaataatttgtttcccagagaaccaaatctgcgcaatcgtaactggcagtgctcccttcccccaaacaggtttacccaaatgtaactggtgtggcttgcgattaaacagatattttgttgaactccgtttcttattttttttttgaaactttttaacagagatacaggtttctggtattcgaaacttcacagattcaggaaagagagagaaattctcttctaaatgtatgcgtcatttcacatggactcttcagttgcagctgaggcctgtgagggtggcagagcagtgaacagaatacagagcaggaaagagagcctggccgaagagttctgaaggaggagataggcaaggttattaaataggttctgacagtcccgtagaaccagcaagagacaaagcaccgggcatgaaatgggaattagaaggccatttagcaatccaaaatggcaaccctatcagcaactgaaagctagcagggaaagaaaaatccagaagttgttttctatctgatttcactggagatttaaaagtgaagttgcaagagagtacaaaggaaggttgcttgtgatgggggggtagaaaacacaagtgagacaagccattttcccagaaatgaggcaaagaatttccgttaaatgcagtgtgttgtgactgaatggagagccaattgactccaaatcgtttggtgtgttgggatcacaaaccttgagatggcctggaattctttgacaaatatttactggtcacctacgttaggcttttgttctagatgatgatgagcaaaacatgatttcaatattgtgcctgttgtctgtgaccattgctgtgttcatcccagttgcctgtgacagtcatgatcaacaagtctgcaccatgaccttctcatctccatatccagtgcccaagttattcctttccccaactgcagggtgagatgtgcctggacacggtctgccactgtggcagttgcccctcaataaacataattgagaagctgagggcacacagggccagaggctgttgtcagactccaaatctaagactggcccaggttccagatgcaactcaaaagggccatttcgaagaaaagagtcctgtgtgagtattctcaatcacatatagacagggtctgcctcagggactgcttctccaattgtaaaaggatatgaacggaatcgtacacccttaagttttacacatgcataaagagctttatacacaaaaacccatgtccaaatatcatcacacttattgtccagagtgagtgatgtgactcctacattgcaggctggaaacatcagctccaaatgttaagtgactttcccaaggtcatacaactggtgactatcagaatcaaaactcaaacactgattttctaattaccgaccattcactgtttttattatcacamgttacatgtctgcccaatatttatgctttataattcaaatgtgtatcacagaggtataataacatactcttacctatttacatatgtcaataggcctaatatgtctatgcagctatttagtaattaacagagtgattgttattgctattgaatgattactctgtagcaggcaccatattaaatattttaaggttttttcttttttaatcctcaacaaccctatgagatatgtactctaacatataaggaaattgagactcagaaggttacatacctgattcaaagttacataacgtatatgaaaggtcatgttctttctatgaggtactacttacttcatttctctgatgcacacgtgcacttgttctctttctctttctcctcctttctctccctctctgcctctcttttgatcgttgtctctctgtctgtgaatgcgtgcaagtctctctcattgtcatgtagacaatgtgcaactctgctctataatctaattaaatagtcaaatgagatgtcatccaatgtagtggataggcaaacacaggataaacaagagtaacagtggtctctttggcccttttagttattgagctgaagtcacccctcctgggttttgcttggcctttctgaaaaaggtcttcctcaagaaaaaaatttgagaaaaaaaaaaaaaacttgaagaagacacagatattttgctggcttgataagaagtagtttgcttcagagttgtggagaatgatgtattcaaaagtgggtagacaagcaaaggctgacaatgggagctatatatttgtctagagagtagagaatttttagaaagtacaagaaatgactataataaaatattactagtgattcagtatagaattgtgacgtattttgtagaaaattaaataagaaacatagcttgttaccttgctattactttagaattacaccaagactctcctgaaggtttatgattataaatccaaaagatcattatactgcattagggtggataattactgacctgatttggatcaaggtgaattcaacttcttttcatcaaagtgtaattattctttattcaagccctttccagatcaacattctctttgatggaaggggaaaataacacattctttctaatacagtatgtatatttattaagtatcatagatccttaattgtaaactgattttctactttcctggggtcactggaggattgcactccagaactgaacaatgccttaatgaatgtaatttggtggctccacttgctaatgtgacttgttcctactgtttatttcacttcaaaattggacgtgatcagatatggaagcataattacactgtgtagaaataagatccaagatttccagacctgacagaagaaagcatgtgggcatgtaattaagagagaggaaaaaagttgacctactttttgagtttcagagatcaacctgtacatctgactatggatcaattcatccccttgtctattgttcttctaataatcctgacctcattttttattgtttgtactaatgaaataatttgtagtctaattctgttgatttagaactccaaacaaatgagagatttggaagtgtcaattaggcaatctgtggaattcctttcacaaagattgctttgttagcctcattttgtattcagtatgtgaaattaatttgggggcaggggtaatgggaaggaatcatgccagttacaaggtcattgcaagggatgattcaaattagaaactgtcacatgcaacacatgataactgggtgtcttcttcacttaaaagaactatcaatattaaaattaatcatctgggaacagtcaaaatcgtaatggccctcctcttttaaagaataaaggtgattttatgcaaatggtggtaaaagaaagaaagaaaaagaagaaagatgagatttcttaactctgcattcaagggtctggtttaacttccaggaaaggagcaatttggtggaagtaatttgtctgtaaggtctatagaacattcacgtggaaatatccactaggctattacggacctgaggtcctggagagatgtctggactagagacctatttgagaaccatttgcgtaaaaggcagaattttctaatataactttttgtgatgataagactgttctatgtttgcactatccaatatagtagttactggccacatgtggttattgagcatttgaaatgtggctagtgtgcctgaagagctacatttttttatttcattttcttctaattaacttaaatttaaatagccacagagatagtggctgccctaatggacagcacacatacagaggaaaattgaagactgactaatggaggacgagattgcccagacggactgcagactgagaagggcaaaaagtctaaaagagaactgaaggtaataaatgagcgtttcagggatgggaagataaatatgattagaaagagtcatcaagataaagtaagaacccagcatattaaaagacagtagagaatagagttgcaaaatgggaagataaacagcgtcaaatgctgcttaggagtcaagcagaatgaagattctacaggggcaatgatttattcttgcaatatttataaaataggcattaaaagatacccagaagcatgtcgtcctcaaagggatataaaatactttgaaacttacggtttgtttttaaaaaagcatctgagattttgtctctgaaagtgaaagttctcttctatttgaattagtcggcatatggtatattttcaaacaggtgtttgaaaacaagcaacttaattcagtcaatgctttgcctggtaactggatgctaatgagtacttttaaagtaaccacttgtttgatcacatttaactatttggagtcttttcaaagcaatttacgtgctgtgtggagctagctataaacttgtcttgaggatggatgtggaaactgtattcagcaaaaagaacagagtaataacacggacattttcttgaccatctattgaagtcaccaaggcctgggctgtgcatctctgaaaggaaagccctttgagatcaatgcctatggctttcaagcatcgctggaactctttttgagttgttcatctgccacttctttccttgactagtttgaactctttacaatttcacgtaaaattcccacggttcactaacttttaaagagcaatatttcttccccacctcattttgtgacaactcacacaattgaagccacacaattgaaatatcttgtcttgagcttgagagctttcagttgagtagaaaataagccacatggaactatcctcaaaagcattcagattagcttattgtggaacactcattcagagggaaatacaaatgcagacgttttaattcactatccagtcgctcctaagtgatatgcccagagagctctgtttagtaggcatagctcaaaaatctgttttcttatttcccaagagtatgcgccccaatagcctctctatacctctcatggtcttccctggtgatttactccaactgttgtctgaccctgactaattcaagcccttttcttacaaacaccagcttcacaaaagcaccgggttttgacaatttgaagtgcctctttcagcagaaatattaccatgccctctgcagtgtacaaaccggagtaacatgtgttaatctttctgcaaagcagaacctcatatttgaggtgttcccctggggccttcacagagagaggctagtggatgtgaagatttaaagataaaaagatattcactgtacaggtgatgaaaggatcggacagaaggtcacccagaagctactactgcttcccaatatgcagttacaaagacacagaaatagtagtctctcaataaatggttctcaaagtttctctggtgaaaatatgtctaaaataatatcatcaagctcaagtgcaactggtatgaattttcatcagtacatttcaaggctagtaacttttagttttatttttttagaatcaaataaatctagtttagtacccatctgttaaaattgatagaaaatttaatctcagcagtgttttgggagactccccccaacttgagattatacaggagacagaagggctattcagtacataaaatgtaatgatgagcctctgttckccaatgcttcatggtccttgctcagaccagcctacttcactcaaactcaggtggctctctcttcctatcatgccaagcttaagcatagaaacttcactgagcacccaagctaaagctactaatgtccatccataccacgtagccatctcccctttggatatctgcacggaaacagggaacatggaacttctactcatgaaatttgctaccaaaattaaaacctaacccaatttggaaaccttaggcaaatccactgagtatcccacattaagccattcctcacttttggtctaggcatcagtttccatctcctaaagtccagcatgatttcttgaggcatctaacattgaaacatacaaattcttaactgggagaaaaggatttggaagagcagctcagcatttgaggctcaaccatatcaaactggatgttctcttttttaacaaatattttgtaatactcaatttactgccatgaaaagaaagccacactctgcatacttacataattaaggtaaaaatatgatacaatgccagaactatatcataaaagataagttcaaggaaagaaattaataatgagtgaacgcattttaggttaagtaataatgggctagatggatttttatgtgataagagcaaacaaagagaaaaccattgttgcaatggccataattatggccaaacaaattacacacttcaagatgagaaaaggaacaaacgtgtgattcttgcaaatgagtttgtccccatttttatgagttatgatataggacaagaaggtatgagttatcatgaaaaacacatcttctaatttgaaatcccatcacatgtcgaggtatacgttatggtctctaatagataaataaatcttagataacatatctttcaacagacaatgagagaataaaggatatattagaaaaggaacctaataagataagttctagagtggttataatcgacctcaggggacaggatcagaataagattgaaaacaaataggcaacccaaaaaattaaatgaaaatttccatatgaaatgtttacaactactatatctaattggcctaatgatgtattacaataatagtaataatattcttaaaacaacatttattgatgaaaatcagtgatatcactgcaattcataattctgcaaatttgataatatttttacttttagatccattgaatggacttcaaagtaaaaatttattttttatcaattctcagatacaggtgcctcaaataggtctagcagaacccctattaatgttaaagtttgtgatatggttaacaactcttgacaaaattccaaacaaaactaaggacagactttccctattttacatggaattttgcatctccaaaaaattttaatggttattaaaatgtgcaacaaatactttgggtttctatgtaaaattgaagttgttttcaaactcagctaagtattaacagcttttatacataaaataatgtctgctgggatattccaaaatagtgcagaaaatagtatgagtcttctttttccaaagcctgttccagcattgcagaacatctcggctgtctggccactagtcactgaatgcttgcagttttctgtaatccctgtgacagccaaaaataaaaataaaaataaaaataaaaatcactccaagatacttccaatgtgcttcctgtgtgcgggggagggggtgttctactccagcttagagccagcgtgggtcacaagacacaagacttgagtgtagaaagaaatattaccttttgatttttcaaatttctgacaacaagaacaaaatatcagcatttcaataaaccatagatattctcatttcacaagttatggaaataatgaaaggaataatggaaacccctagactttatgccaagttaagcatatccagaaagaagtaagctttcttctccattccagcttatctacccattcctacatttatactgtggactctgtcagtacctaaagctatgctgccactgaaagcattgattcaaatatgtctttcttgaacactatctctaacccttccagctarcttaaaggatcccaattgtgttaaattagtcccyacttactgtgacattcagtscattcatttctctactttctccctattgatcagtcctcgacttccttcagagtcctctttatccagcttagattccgtgttccatcaattagtattccatcaataatactattgccattattctaaccttcttactcatctgtcactgtgcttatttggcaaaacccaaaaagagctaaactcaaatatctaccctttccctccctgcagtgagaaattccaagcctgcaggagaaaatcctaaaatactgcaagtttgttttacaataaattcatggtcaccaaccttaaataaatcaatcctcaacactgctacacattcctattatgccccttttctcaactgatgcttccactctttccaaggtctatgtcaagcataattaccctcttccaaagctctgactccacctccccttttttagtgtgcaaaatgatcttgttccttccctcacaagggaaatagatgcagacaaaaagtccttcagtttctgcctatttcttgttacaaacccacctatatctgctccagtcttttccttcctctttctcattacagtagaggtttccttctttagtcagaaacaattcatacaaatctctctccaaatatgtttcctctgttacttgtttgtacattctcatgtatatttactttgtaacccattccaatctgtttcaggttcttactcctcccctcaaatcacttttgtctatgtcatcagtgcctaattgataagttctggctacaccatatactttggatgagttagcctgcctccaagatttaggttgtcattgataaaagtgcagaaataatattcgttttgtagagttgctgcaaagattaaatgatataatattaatgaaatcattagaaaaatatctgaaacagagtataaactccataaacattatctctttccagtagtagtagtatcagcaccagcagcagccgcagtagtagtaatattaataaatccagtaagtgatccttagttctcctgtgtgacttctcagcacccttgactccgttaaccatgcaaaatactggctttctgccctgtagatttatgcgactggctttatgatgccatgatactctctataatgcctcaatgatatgtgctggttttgtcagatgcattctttctattttatctttgttctcagagtgttgtggcaacacagagagtgtcttaagcccctctgagagaaaatttcaccaactgttttagtctttctggaaacgggatgctgagcggtggcatattttttgttcgatgctgttgtactctgcattctcaactcatcctcagcaactcagagacttcagagtttagtcatttggtacaaaagacatgtgagctgtacataatatattgcagctccttaagggtagaaactatgactcattcctctgtataccctatggcatggaacaggatgcttaacatatactaggtctcaataaatgtgctttgaatagaactaaaattggaaagaacaggctgaatactcaacttgacattcactaaagtacgttttcatgcttaagatttaaactgatctttacaagkctttctcttgctgattaagcatccatttgctaaaatgctgtctttccttttcttggtagctaacattgacagtgtttcccatcagtcctctttatagagaatctatcgcctgaaataattagtatactcatcagtcttgtttagatattgccatccctagctggcaatttccattttagagaatcagcaaaaggctttgatgccatgacagattacatggatgtgaggttagaaatttcaagatagatcaagttcaggcagataaaggaatgtatttttcctctgagttcaaygaggcacactgacaccagcatactgtacacagtctgaaattgtcacacaaaacacttagtttttcactaaacatgacttatacactgaaaacagactgatacctgaaacttaacaccaacaggttttgtttctcagtctcaaaattagtgtggcctctggaataggttaatgtgagtgtgtgagcatgtgtatgtgtgtacatataaatgtgtgtgtgtacagaaaaaaacacacttttactgaagaaagtttgtttaataaataaaagggattcacggatgaccagttagaaaaaaaaatattgatttagagccttttctcataccatacatcaaatttagttaaagcaaaaataaagtagaataaaatgaaggtggttattgatccaacctctggatctcagaatgaaaaacatcttgcacacttaaaagcagtagaggccgggtgcggtggctcacgcctgtaatctcagcactttgggaggccgaagcgggcagatcacctgaggtcgggagttcgagaccagcctgaccaacatggagaaaccccgtctctaataaaaatacaaaattagctgggcttggtggcgcatgcctgtaatcctagctactcgggaggctgaggcaggagaattgcttgaacccagcaggcggaggttgcggtgagccgagatagtgccattgcactccagcctgggcaacaacagcaaaactctgtcacaaaaagaaaaaaaaaaaagcagtgcaaaaaaatgacaaagtttatgattagtaaatttgacaccataagcatcttattttattataaattttattttaggttcaggggtacatgtgcaggtttgttgtataggtaaactttgagtcaccggcatttcatgtgcagattattttgtcacccaggtaataagtgtagtacccaatagttattttttctgatctccctcatcccactcttgactgttaagtaggcctggggaacccctctttgtgtccatgtgttcttgttgtttagctcccacttataaggaagaatgtgtgatacttggttttctcttcctacattagtttgcttaggatgatggcctccagctccatccatattgctgcaatggacatgatctcatttttttatggttgcatagtattccatgatgtatatgtatcacattttctttagtctaccattgatgggcatttaggttgatttcatgtttttgctattgtgaatggtgctgcaatggacataggcatgcatgtgtctttatggtagagtgatttgtagtcccctgggtatataaccaataaggaattgctgggtcaaatggtagttctgtttcaattctttaaggaagagccacactactttccacaatggctaaaccaatttacattcccaccaggagtgtgtaagtgttctcttttctctgcagccttgccagcatctgttgtttttagtctttttgataatagccatttggactggtgtaaaatggtatctcattgtagctttgatttgcgtttctttaaatgatatgatttggagctctgtccccaccaaatctcatgtcagattgtaatccccaatgttgaaggtggggcctggtgggaaatgattggaatatgggggaagatttgtcatgagtggtttagtaccagcctcttggtactggcctcatggtggtgagtgaattattgcgagatctgggtacttaaaagtatgtggtacttcccctctccctctctcttttgctcctgctattactaccatgtgaattttctgctcccgctttgccttccgtcgtcataagtaaaagctctctgaggcctccccagaaggagaggccaccatgctttacataaagcatgtacatcatcctgcagaaccatgagccaattaaatcatttttctttataaattacccagtctcaggtaactttttacaacaatgtgagaatggcataatacactaatgattagtggtgttgaccattttttcgtatgcttgtgggccacacgtacttttttttttttttttgaaaagtctctatgtaattttcccactttttaatgaggttgttcgttttttgcttgtaaatttgtttaagttccttatagattctggatattagacctctgttagatgtataatttgcaaatatgtcttcccattctataggttgtcagtttgctctgttgacagtttmttttgctgtactacagaagctctttaattaggtcacacttgtcaatttttgttttcgttgcaattggttttggygttttcatcatgaaatcttggccagatcctatgtccagaatggtattgcctagattatcttccagggattttatagttttgggttttacatttaagtcttcaatctatctcgagttgatttttgtgtatggcrtaaggaagaggtccagtttcggtcttctgcatatgactagtctgttatctcagcactatttattgaatagggagtcctttccctattgcttatttttgtcaactttgttgaagactagatggctgtaggtgtgcagcatttcttctaggctctctattctgttccattggtctatgtgtctgtttttgtaccagtaccatgctgctttggttacygtagccctgtaacagagtttggagttgggtaacgtgatgcctccagctttgttctttttgcttaggattgccttggctattcaggctcttttttggctctatataaattttaaaataggtttatctaattctatgaagaatgccattggcagtttgatagaaacagcattgaatgtgtaaattgtcttgtgcagtatggccattttaacaacattgattcttcttatccatgaacatgaaatgtttttccatttgtttgtgtcatctctgatttcgtggagcactgttttcttccacctctctggttagctgtgttcctaggtattttatttgttttatggcaattgtaaatgggattgcatttctgattgtgctctcagtttggatgttgttggtatataggaatgctactgacttttgtgcattgattttatatcctgacacttggctgaagtttttttttatcagatcaaggagcttttaggcagagactatgggattttctagatatagaataatgtcatctcaaacagggatattttaacttcctctcttcctatttggattcttttcatctctttctcttccctgattgctctggctaggacttccagtattatgttgaataggaatggtgacagacagcatattgtcttgttccagtttttaaggggaattcgtccagcttttgcccattcggtatgatgttagctgtggatttgtcatagatggctctcattattttgaagtatgttccttcaacacctagtttattgaggttttttaaacgtgatgtcatgttgaattttatcgaaagtattttcagcatcttttgagataatcatgtggtttttggttttagttcagtttatgtggtgaaatacatgtattggtttgtgtatgttgaaccagccttgcatcctggggataatgcttacttgattatggtggattaacttttcgatgtgctgctggattcagtttgctagaattttttgggggattttgtcactgcgtttttgaggatgttcatcaaggatattggcctgaaattttctgttttgtggtgtgtctgccaagtttcagtatcaggatatggcaggtctcgtagaatgagtcaatgaggacatcctcctcctcaatagttgcagtaggaaatgtatcagctcttcttcatatatctgctagaatttggctgcgaatccgtctggtcctgggctttttttttggttggtaggctttttattactaattcaattttagaattaaaatgtctgttgaagcattcaatttcttcctggttcagccctggcaggttgtatgtgactaggagtttattcatttactcaagattttctagattatgtacacagaggtgttcatagcagtctctgagggatttctgtatttctgtgaggtcagttttaatgtcccctttgccatttctgattgtgtttatttgggtcttctcccttttttcttttattagtctagctagtggtgtatctatcttattaattttttcaaagaactaagttctggattcattgatattttgcgtggtttttcatgtcccaattttcttcagttcagctttgattttggttatttcttatcttctgctagctttggaattgatttgctcttgcttctctagtttctctagttaggttattaatttgagaattttctaactttttgatgtgggtaattagtgctataaacttctctcttaacactgccttagctgtgttccagaaattctagtatattatattgctgttctyaatagttttaaagaaattcttgatttctgtcttaatttcaatatctacccagaagtcactcagaagcaggttatttaatttttatgtaattgtatggttttaagcaattttcttagtgttgacttctgcttttacagcactgtggtccgagattgtggctggtatgatttctgccttttttactttgctgaggattgttttatgtctgattatgtggtcgattttagagtatgtgccatgtggcaatgagaagaatgtatattctgtcgtttggaagttgagagttctgtagaggtctgttaggtctatttggttaagtatgaccacatttttaaatgaaatattatgataatccaataatataaaccagataaaaatggagctgggcttattgaaacagcaagcaacatgcagttccattagcttagccttcttctttttcaccccacagtggttcctgaatcagatttccaaaagtccaggacttcgcaggcatactctgaaagccattgacctagggtgtggactgtgagaagtctgaggtagaattttttcccactgaactctttcattgaaagcattaaggaattcagaatacaatgatgcaagatgctccatctgtttatggcttcgtttcttaccatatgctgccgccactcagcaaaaacgctggggaggtggaagcttggcatttggtatgtagatagaagaaaagaaagtaccttccaagaargcagtgaatgggtgtgagaggggaaatggaaaagaaataaaggggaatgtcttaaaaactaaggcaagttgttgatttttttaaagaggatggagtggtcaaaagggtaaatattgatgacagtctgataggatagcagctgatttrtgttgggctgagttgagaagaagaggggaagaactggaagcagtgagtataagcaacctatctgtaagtctggctgtacagggaagaagagtgggcattaagtggatgcttatttttctttcaatgaaaaagaactaagcatgtataacagctgaggcaaatcacttatttgagagataaaggttgagaataataaagagaaggagcaaacaataattaaagttccctgaatacaaaggtcttgaaatagtgggagattatactgtctgaagcttgagctgggtgtctggcctcagcttgaaggatatacaggtcccatatcatgacaaaaatgaaggaagataaaaatgagtagagttcaggtacaggcagacgtgcatatgataggtggacacagaagttcccttctgtaactttctgttccttggtaaaacagggaaaaaaaatttcatctacaaaacgtgatataaggcagggttcagatgtgaaaacaaattttgaagttgcctttgcggatacagggaaatcagattgaccatagaaatatgatatgtttttcacgaagaatcgagggcccacttgaagttcataatcatgaattcatgtttaagtcatctgctctgttgaatcataattttcaaaaaattcagctgactattggcacagagaagttagccagttggattaatgcgcgaggttgggtttttgcaaaatattgagttttccttggcaatgaaaagacaaataatgtaaggcttttggggtattgacaaagatgttattgaaatggttaactatggaaataggttggttaaaaggggaagttgagaaaggggagtattgattgatgagaagaaaatagagggtaagtactttgggtatcctaaagagattaaataacagttgtgctactagttgaactataaaactgaaaggacaggtggttgtgttaatagaatgggctactggaatgagagattttgcaagtgcagcagttatgaataatgattaggtcaagggtgtagctgcgggagggctaactgaaaaagcctggactagagggtcattggaactaggaggccaggatatgtagattgggccatccacataggcactgacgtcatcttagggtaatggagggactttgggtagagaggaaaactgtgaaccatgtgccaaagtcatggatgaatgagtagggtagttgatagaaatttggagagggaaataattttaaagctggatgacagacctttcaaaacagcacagatatttacccgcagcatagaggaataatattctagaagaggccatggaaagcagtagtgacaccgtcactactttcaggtccactacttgagcagtgatatagcaagagtaattgatgctcaggaggtagtggaatctgtttgcactttttttccctattccatattaggattttgcctagaaaataataaattcatagtgaaaccagagtatgtttattcaattttttgaaaactcagtgattataactgaatacaaaatggtaagaaacgttgttttgacctatgccattttggcatcccataaactgtatctgggagcacatgtagttccctttactctgccacttcatataagaagtctgcagggaaagaagtatccttttcagttaaacaaggaggtggaggaaatgataagaaagaagttgaagttggctcattatgaaaaagcaaaaaatctgaacatcatctgtcactctcagtgaactccagcatcaaataaagcatcaagttctttcaaatgtgtctcctaaatatatcttggaatagttcacttctgatcacccttacggctaccactctgcttcaagccaccattctctctcatctgttctattgcaataattttctcattagcttctctgtttcctttctagttcacctccaatcaactttccattctgcagccagagagatccttctgaaataaaagtaggtcatgctgcttctctctcctcaaatgattcaaaatgaaaggccttgtcccagtattcctttacatacatgtacatctcatgacctaactgtaatgaactacttgaccaaacatgctaaacttttcttrtacttgtgcttatattcctctccttgcttggaaggcctctctatagtccttgccttctgtgcttggctacctcctgttctccttaaagattcaggcctgggtagtccctccttcaggatgttctccctgacatgtttaccccaaaggcaaagtgagaagttctcatccattgtgcattaatagagccatgggattctctctatcataacacttattaaagtatgtaatagccacctatttgcttgcctgtctacccaacatgcacagaagtttccaaattgtagacacttaacagttcattatatatgaatgagcttggagagaagagtctaccagttttggactcgagttggctaacttcattctttccccagaagaagtggggtgctatggtctttccaatagatggttgttcaaccattgcattgccctccatagtactctttgtctctcatacaatatctttactttgtgcaaattatagccaccgagcacacagtctgtcctataatgacttctagcaaaatgcaattttcacaagatgacgagagagacttagcaaacttactatgctacaacagtataaagtcagcatttactatataaagaatgtcctgaggaacacacacacattttcaggaataagattggttatgaaagccattgatacatttcaaattcccatgtatttgatgtttaaaatgtttttaatttgaacccaacttagacatagagaaaagtatcaaaatttatggagttccttcatgtctctcacccagcttcccctaatgttaacctgttatatagccatagtacaatgatcaaaactaagaaatttacattgtttaatttggaaattgtatcgtgacttagctatctcatcatctgaagctttcattctgttgatgggaaggtgagtttttgcagctctagttgcaaaaagagagaactggagtaggggactctgcagggaagttctatcctgtctacatttaaagagatcagaccttgaactagagtacacttgcctgcaaaaggaacaacactatcactttctgaagggaaactaacctcttatctaaaaaggagagagatttggctgaaagaatgctggactagggcacagggggcctgggttgaaggctcagttctatcatcagttaattctgtgagactgtgcaaatctcagcatttccagcatcctcactgagctcactgacttctaagatctctcctaactccaaagtttaataacagagtaccatgtagttgaaagagcaagatttaaagccagtatcacattaacatttacataagaagccatacacttgactatattgaacaataaagtaaggagattacctgtgtatctgattggaagagaattgccaaggggaataattatatttattttatgccactgaaatactgtacttcatggttctctgttgtctttcctcaatattgacttctactttaatatttgcctggtacaacaaaagaagcccaaatatccagttaggatgcagatgaaatgatatatggagctcaatttggaagaaaagaaccagtgaggaaacaatctttaatgtttgcaataaaagcaaaccgagttcagaaataaaaaggaaatataggacagcttataaatgtaatcactgctttacctcatccactttcattctctaaaacaaacctaatctgcaaatgctatgtggagccctccatcattgaagagagaggagtaggtataatggggttggggaaatagacagtgaagggggcaggaggacagaggatattagttaaactccattcagtacacagtataggtgaaagcactatgctgaaaacaatagcgtctaagtgaacaaaaataagtaaggcaaaagaatagcacataatgacaacatttattcaaagagttttctcctatggactgctggcagtcctcaacatcaactgtttgcagaagagcagtatgttagtttgcaatggctgctataataaagatcctcaaattaggtgacttaaaacaacagaaatacattgtgccacagttctgcggtaaagaagtctagaatcaacgtatcatcagggccacgctctctctgaagtctttagggtggaatctgttctgtgtctttctcctagattctcgtgctgtcagcagtccttggcattccttgacttgcagatatatggctccagcctctgcctcggtagtcatatggtgttttccctgtgtatttcttctcctcttcttataacagatgtcactcttgttggattagcacccacggaagttgagtataatctcaccttgagtttactgtaaacaccctacttcctaataaggtcacattaacagatactgaagattggaacttcaacacctctttctggggaacaaaattcaacccacaacaaagagtttcccaattttcgagtatgaaaacactttatcaatgccctcccacaatgttactgacctctatccacataaacagagttacaatattagtgtttgttgattgagaaaaaaaggcattgagtccagatgctgtggctcacacctataatcccagcactttgggaggccgaagcgggcggatcacctggggtcaggagtttgagaacagcctggccaacatggcaaaaccctgtctctactaaaaatacaaaaattagctgggtgtggtggcgtgcacctgtaatcccagctacccaggaggctgaggcaggagaattgctggaacctgggagcagaggctgcagtgagccgagattgcgccactgcactccagagccagactccgtgaagaaaaaaaaaaaaaaaaaagcattgatttttatgaactttttctaaataccgtaatgctttcaaatacatttgtattttatctttttttttttttttttaaataataatggcacccatccacatttggagaccagtcatacatagaggtacaagacagtcatagtcgaccacatgatggtttgaaaactaatgcttttgagtcttgacttagctccaaaggtgacacatgaccatgggcaggttccttaaccagttttttctaggtcttagtttcatctatgcctgaaaaagggatgtattagttgacctttaaaatttcacccctgacattctcataaatttatacgggaaaaaacatcttaggcaagaatatttcagaagttgtgtttttgctagataagttaatgtccattttcacaatcaaatttcacccctgctaagacgatgtatcagatttggtatttgccaatgttcttacagagcaatttaagataactcagtcaggtaaatagttcagggmagtaaatgcttcatatttttttaaagttgtccagctgaaaagttacaaactcagtttgtctgtaattgatttatcaataacaaggacagacctaccaaggaataaatacttaatgaatctccaacttatcattctttctgcagttacagccttatagctagttgctgcttgaactgaaaacttcctggttacacacccggagtgcacrttactaaaatacaggggtttttcatttccacaagttgctacaaatgtgtgtgttttacattcctcaccagaaatttaagctcacccaaagttttcatattctgtaggctctaattaagatggaatatatctttaaacaattaacttcatggcataaaccctttgagaagctattaaaagamactatttttctttccttttcttttcttttytttttttttttgagacgtagtctcgctctgttgccaggctggagtgcagtggcgcgatctcggctcactgcaacctccgcctcccaggttcaaccgattctccggcctcattctcccgagtagctgggactacaggcacctgccaccacgcccggctaattttggtattttcagtagagacggggtttcaccatgttggccaggatggtctcaatctcttaacctcatgatccacccacctcagcctcccaaagtgcttggattataggcacgagccaccgcgcccggccaagacaccattttacaaaggcactgttggtattggagatatatatctggctggggatatatattcctgggatcatcattgaatccctcttctcccctccatctgcctcatctaatcaataccaacagattctacctcttggttctttcccagattcacccagtcttgtacacgccattgctataatgatgttcagaccattatccttcctcatttagattcatgcaaggcactggaacttctatttggtgttcctgatatttgttgttgctgttgttgatacttcatggttgtccatatttctggggtacatgtgatattcgatacacgtatagactgtgtaatgatcaaatcagggtaactgggatatcatcatgacacccactaccatctcctacaatccattctctgtacattaacttaaatcatcttcttaaaatagaaatctgatgatgctattccctttcaatggttttttcattgctgctggtaaagtctgagtccttctcccatacatacaatatactatattatttggcccatgcctcctgcctcaacttcattttctgatctcctccactcccttcatgacattcaatattccagttgcattgagttccttacaatctactaaacaggactttttctctcttccctccaagtctgttttcatgagccttgctctgtccagaatgcccttctgtcctccttcccattctttatcaagttcctctcacccttgaagactaggctaaggcattccttcttgatagtctttcttgaactacccatcccctttccccaaacattgagattacccataccatgacactgattgtaagtataagattctgttgctctcttcatcacctttctacacctcctgaagagcagagaatacttacccgaataagttaattcccatgatatctgtctgtccatgtttaccatttgatggggtcactgggcattgaaagatcaaactcacatgcacagctctctcttctggttcctgtctcttgcaacaggatgagtcagaaaacaggcctccactttgattttttttttttttgatgctttcttctcactacataagaaagcctaagggtaagttaaacatcatgttccctcttcttctagttgctttagtttcttctggactgtgaccttcacaattgttttttaccttttttttttcctccctgtaggtaatccagaaaggctggaggtagctagcgtcaagtaaatgtgctttcacagatgaactaagcttctggcaaagtctttcccttgaagagtaaacttatttacagagaatattctgggattatttcacaaaggttattctttccctctctgtgccagaatcaggaggaggtatttgttggctcttctttgtgattatctgatagggggttccccaaaaagggatggggccctacttaaaaatgccaccctatcagtttctcaccctcaagccagaccacacttagcctccaaaagttcttcataattctcatgtctgtttctaccagtatatggtttctgtggcttctacttaaagcaagaagatattggctagaatccattatatttgcctgcctctgcagwtttcaggatggtatttgccctgtaacctcagttatttgattgatccaagaaaaggtgattttcagtgtattcagaagtaattttactacgatgacaggaatgataatttccaagttctttaaatgtcatatctacttctgttcatctatagcatttaccacctgctgatacactatgtcatttatttatttatgtttattacctgttcctcatgctaaayacaattgctggggaggccaattagtgtatgtttactgtcctaaacaagaacccaaaacagggccttacctctttatatatgtgtttcaattaacataatggaataattattcatttataatgtgttctggtgggggtgaaggatgggtcctgaagaaaagtaatattggtcctggtgcggtggctcatgcctggaatcccaccaatttgggaggccgaggcgggtggatcacttgaggtcaggagtttgagagcagcctggccaacttggctaaaccctatctctactaaaaatacaagaaaagaaaattaactgggtgtggtggtgcacagctgtaattccagctactttgggagactgaggcacaagaattgcttgaacccgggatgcagaagttgctgtgagctgagattgagccactgcactctagcctgggtgatgaagtgagactctgtcgaaaaaaaaaaaaaaaaaaagaagaargaaagagagagagagagaaagaaacaaagaaagaaagaaaattaatattgaggttcagccaggttaatgatctaagaaccactataggctacatcatgggccataaaacataccttaactaatgctaaagaacagaaattgtacaaaatatattatcagataacaatggaatttaaccagatatcaatascagaaaaatagatggaaaatcttcatatatttggaaagtaacatttttctaaatgatacatgcatcaaagaagtctcaagtgaaatgaaaaattatttgaactaaatgaaaattaaactgcaactctatgaaatgtagtggatgcagtgaaagctgtcctcagagggagatttgcagcattgaatacgtgtattagaaaatgagaaatctaaaatcggtaaagaaagaagagcaattttagcctcaagcaagcagtatacaagaaatggcccaaattagagaagaaatcaataaaatagaaaacagaaatcaataattaaaatcaacaaaacccaaagctggttctttataaagaccaattcaacaaataaaaccataaccaggctaaccaataaaaagtgagagaagagctgggtgcagtggctaacgcctgtaatcccagcactttgggaggccaaggctggcagatcacctgaggtcaggagtgcaacaacagcctggccaacatggcaaaaccccgtctctactaaaaatacaaaaaaaattagccgggtgtggtggcgcgctcctgtagtcccagctcctcggccagctgaggcaccagcatcgcttgaacccgggaggcagaggttgcagtgagctgagaccctgccaccgcactccagcctggggcgacagagagagattccgtctcaaaaaaaaaaaaaaaaagaaagaaagaaaagaaaaaagaaaaaaaaaagacagagagaagaaacaagttactagtattataaatgttataaatgaaagaggcatcattattactaatcccatcatactacaaacaattctatcctcacacatttaatacaaatatgaaatagacaaattctttgaaatacataaactatcaaaacccataaagaagacacagaaaatctgactaggtctgtatttataaaagcaactgagtcaataattaataaacttccaaaaaagaaagctccagacccaaatgttctcactggtgaagtctaccaaacatttaagcaaaaaaactaactaaaaaaaataaatgaaaaaaaaatcttcactatttcttccagaaaatagaatcagaggtaaaaattactaattcattttatgcagcatttcactaataccaaattcatataaagatattgcaaaaaagaaaaaccatggacaaatacttctcaggagcatagatgtaaaaattctcaaaaaaatcatcaaattgaatccaaggctatataaaaataattatatattatgagaagttgggatttattccaggtaagcaaagttggttcaacatgcgaaaatcaattaatgtgatccactatatcaatacacttaagaataaaaccatatggtcattcagttgtaacctaagcagcatttgagaagaatctaacacacattcaacataaaaactctcggcaaactgtaaacagaggagattttccttaacatgataaagaaccatgaaagccggaagttaacattatacttaatggtaagaaattggacactttttcctgaagactgggaacaaagcaggaatgttccttctcaccactcctattgaaaatcatactggaagtattagtaagtgcaataatacaaggaaaggaaataaaatgtatatagcatgggaatgaatttgcagataacataactgtccatgtagaaaattccaaatatcaacaaaaactcctgcaactaataactaaacataagaaagtcacagatataatattaatatataaatacatattgttttcttttatatgacccccaaacataaagaatttgaaattaaaatgtaatatcatttacattagcatcaaaaaatgaaatacttaggtataaatctaacaaaatatattccatatctatgtggtgaaaactataaaactctgatgaaagaagtgaaagaatatctaaacaaatggagagatagtctgtgtccttggattgcaggactcaatacagtcaatatgtcaattattcccaacttgatttacatagatgcaaaatcaatcaaatgtatggcaagctattttgtgggaatagacaaactgattctaaaatttatatggaaaggaaaaagacccagaaaagccaagaaacactgcatctgaacaaccaagttggcaggctgacactaaccaacttcatgacttattataaagatatagtaaacaaggcaaagtggtatcacccaaagaatacatagatgaagagaacagaataaagagtgcaggaatggactcactcaaatacagctaactgatctttgacaaaagaataaaggaaagaaaagagtaaaaataccctttaaataaattgtacacccatatgtgaaaaataaataaacaaacctagacacagtctatgaagctttcataaaaattgattcataatgtatcactgacgtagatataaaatggaaacaataaaatttctataagaaaactagggggaaaatgtaggttaccttaggtttggcaatgagtttttatattcaacataaaaaggacaatccacaaaaaaaaaaagtaagttgagctttatgaaagcttaaaacctcttctttgcaaaagatgcttttaagagaatggaaagacaagccacaactggtagaatatatttgcaaaacacacatttaataaacattttgaatccaaaatagacaaagaactcttaaaactcaataagttagataaaaacctaatttaaaaatgagcaagcaatgcaataaaagaggatacaaacaaatggaagaacattccatgctcatgggtaggaagaatcaatatcgtgaaaatggccataytgcccaaggtagtttatagattcaatgccatccccatcaagctaccaatgactttcttcacagaattggaaaaaactactttaaagttcatatggaaccaaaaaagagcccacattgccaagtcaatcctaagccaaaagaacaaagctggaggcatcacgctacctgacttcaaactatactacaaggctacagtaaccaaaacagcatggtactggtaccaaaacagatttatagaccaatggaacagaacagagccctcagaaataatgccgcatatctacaaccatctgatctttgacaaacctgacaaaaacaagaaatggggaaacaatcccctatttaataaatggtgctgggaaaactggctagccatatgtagaaggctgaaactggatcccttccttacacattatacaaaaattaattcaagacggattaaagacttacatgttagacctaaaaccataaaaaccctagaagaaaacctaggcaataccattcaggacataggcatgggcaaggacttcatgtctaaaacaccagaagcaatggcaacaaaagccaaaattgacaaatgggatctaattaaactaaagagcttctgcacagcaaaagaaaccaccatcagagtgaacaggcaacctacagaatgggagaaaattttcgcaacctactcatctgacaaagggctattatccagaatctacaatgaactcaaacaaatttacaagaaaaaaacaaacaaccccttcaaaaagtgggtgaaggatatgaacagacacttctcaaaagaagacatttatgcagccaaaaaacacatgaaaaaaatgctcatcatcactggccatcagagaaatgcaaatcaaaaccacaatgagataccatctcacaccagttagaatggcaatcattaaaaagtcaggaaacaacaggtgctggagaggatgtggagaaataggaacacttttacactgttggtgggactgtaaactagttcaaccattgtggaagtcggtgtggcgattcctcagggatctagaactagaaataccatttgacccagccatcccattactgggtatatacccaaaggattagaaagcatgctgctataaagacacatgcacacgtatgtttattgcagcactattcacaatagcaaagacttggaaccaacccaaatgtccaacaatgataggctgaattaagaaaatgtgacacatatacaccatggaatactatgcagccataaaaaatgatgagttcatgtcctttgtagggacatggatgaagctggaaaccatcattctcagcaaactatcacaaggacaaaaaaccaaacacggcatgttctcgctcataggtgggaattgaacaatgagaacacatggacacaggacggggaacatcacactctggggactgttgtggggtggggggaggggggagggatagcattaggagatatccctaatgctaaatgacgagttaatgggtgcagcacaccaacatggcacatgtatacatatgtaactaacctgcacattgtgcacatgtaccctaaaaattaaagtataataaaaaaaatgagcaagacttctgaacacaaaccctcagatatacaaatagcaaataatcatataaaaatgctcaatgtcattttccattaggtaattgtaaactaaagcaacaataagtatcatcacatccttatcagaataaataaacaaaatattaaaagtaaaaaaaaagatgctaaatgctgatgaggattaagagccactggaactctcgctcattgctgttgataaagcaaaatggtttaacaatgttggataaaatctggcagattcttacaaagctaaacatagacttagcacaaaaatcacacttctatgtatttacccagctaattttaaaacttacacccgtgccagaaattgcacacaagtgtttataatggctttatttgtagtcaccaaaatgtgaacacaaccaagttgatcttcaataggtgaatggttaaacatttgtagtacatccatacaatggaatactattttgtattacaaaatgagctatcaaaccacaaaaagacatggatgaatctcaaatctatattgctaagttaaagaaacctatctgaaaaagcatcatgctgtataattccaaatatatggcattctgtaaaagggaaaattctagatacaacaaaaggttgagctgctgtcaaaactcagagctggggaagagatgatggaacagatgaagcatagggaatttttagggaggtgaacttttgatttaatactgtactggcggatacatgaaattatgcatttgtcaaaacccatacaagtttacagttgaaataatgattcttaatgtaggcaagtttaaaaaaaataagtggtcaagtgtcccaggatgtaatgcagaatgtgagaggagaatttcattgcattacaaatgtatgaaataacctcactgacatgcatagaggaagtaggcatattgacctaattaactttgaaaatgagtgtagtcttgaataccaaagccaaattaaactacacataaacactgtactctaattgataagattgtttccaacagggatatggattaacaattctgaaaacactataaaagaatactgaaattgagcaattaaatagatggcagatgatgggtgccagktttctcagtgttgcagtaggagtatgaagataagcaagaggaagacctagaataaatatgtggtagtagattacaattgaaaacatcagtgtgaactcatgtttaacttaataaagacatagatggttacatatagaaacagctataaggatacaaatgggttagtatacacacatacacatatggagtaacacttaygcaaaatgcttgggaccaaagggtttcaacgtttagagtttttcagattttggaatatctacattatacttaccagttgagcatctttaatctaaaaattcaaaatctaaaatgcacaaatgagcatttcctttgagtgtcacgttggcactcaaaaagtttcagatctttgagcgtatggaattttggatttttggattagagatcctcaacctatatttccttgttctgttagctaagatggctccaaagtaatgacaacatcaatgagcacacctagtgcccagatcttggtttctaataccatttgcaaataaaaggaaccagggctcattgaagaaatagctgactgtgggcccggggcaagaagcatacaagaggatgaggaatcttttagcagaaagtaataaaatgttaaagaaacaaaaacctacaaaggataggatatgtcaatggggataggagccaaatataagagctcctgttccccaaacctagaaaagtttgaacaacaaaatagagcatcattaatagagagagatatatatagccatatatatataaataaatatataaatatatataaataaatatataaatatataaataaatatatatataaatatatatatagccatatatataaatatatatatagccatatatatataaatatatatagccatatataaatatatatatggctatatatatatttggctatagtttacatatatactatatatactgtatatactatagtatatagtatacatatatatgtgtgtgtgtatatatatatatatttggctatagtttaatgatgctctattttgttgctcaaatttttctaggtttggtgaacaggagctcttatatttggctcctatcccaattcgacatatcctatcctttgtaggtttttatttccttaaatatatatatatttccttaaatatattatttccttaaatatatatatatatatatatrgatcaggccatagtgatataaatatacaactgaataaaaaataagttagatttggtagaaaacctaaaattaaaatcaacgagggagaacaggcaaatctcctgtacataaacattccaaacaattcgtgtggacactctgctctcaaggagatctcgcataacttcccactccttgagtgtggattctgcatagtaacttccttccagagtacagtataaaaaggtgggggaaggaataattttatagtggagaaatctgacaaatacaatctcagccaagtaatcaaagtcaatgtcaacagtgataagtcatgttgatagtttttacccttgctatcatgtgataagaatgacacttaccttagtcagtttgagctgctatgacaaaatactatagactgggtggcttttgaacaactaaaatttatttatcacagttgtagaggccraaagtctgaaataggggtgccagcatatttgagttcttgtgagggccctcttctgggttgcagatggtaaactttatttttacttttatttttatttctggggtacacrtgcaggatgtgyrggtttgttacayagggaaacrtgtgccatggtggtttgctgcacctatcaaccatcacctaggtattgagcccagaatgcattagctatttttcctaatgctcttcctcccctaccccaccagccaacaggcctcagtatgtgttgtttccctccctgtgtccatgtgttctcaytgattgttcagctcccacttataagtgagaacatgtggtgttttgttttctgttcgtgcgttagtttgctgaggataatggcttccagctccatccacgtccccgcaaaaaacatgatcccattcttttttgtatttatttatttttttgagacagagtctcactctgttgcccaggtttgagtgcagtggagtgatctcagctcagtggaacctctgcctcccgggttcaagcaattctcctgcctcagcctcccgagtagctgggattacaggtgtgcgccaccatactcggctaattttttgtatttttagtagagatggggtttcaccatgctggccaggttggtcttgaactcctgacttcatgatccacccgcctcagcctcccaaagtgctaggattacaggtgtgagccaccgtgcctggcttgatctcattcctttttatggctgcatagtattccatagaagctgtgaaataagtgggtattgtttcaagccactatctttgtggtaatttgtccagcagtagtagattactaatacagaatttgagaggcgtatctatgcagctacctagggagaaatgcagaaaacagcaggagagtaacatgacctgatgtagactgtaacagggtcactttggtcgctgtattgaagacagactgaaggtggcaaggtcagaggagcctggagagcaggtgagaggatgttgcagtagaccagttgagagattattttggtctgggctagggtggtggtcgtggaggtgacagaaaggagtcagattctggacttattttgaaggcagtgccaaaagagtttcttgacagacagagtgaaagtgggatatgagaaagggaggagtcaagaatgactccaaggtttataaactgagtaacaaaagaatggagctgacatttactgaaatggagaatcaagtaaaccctgggctggagcccctcctcattgcattttcctcccatgaattgtgacctaattctaagagttacattttaaagtgaaagtgccccaggcaaaaataactatagtaatagaacatttgatgacatttattgaactcctacatgccacacactattctaagtgttttatatatctcatttaattatcttaacagtcctatacagaggtactcttaactgctaaattttaaaaatgaaaatattaaggataagagaggttatacttgcctccaggtccacagactgttaagttgtggagcataatgtttatgaacacacaaatacaagttctagaatcagagaaactgtactcaaaacttagttctaggccaggcacggtggctcacgcctgtaatcccagtactctgggaggctgaggcgggcagatcacgaggtcarcagttcaagaccagcctggccaacatagtgaaaccccaattcttaaaaatccaaaaaaattcagctgggtgtggtggcgggtgcctgtagtcccagctacttgggaggctgaggcaggagaatcgcttgaaccagggaggcagaggttgcattgagccaagatcgcaccactacactccagcctgggcaacagagcgagaccctgtctaaaaaaaaaaaaatcttagttctagtttttactatccatgtgatcttgaatatgctatttaatgtctctgagcctgaatttcccaataatagtaagtgaactgggaccttttgcatgtgttagtttatttaacccttaaaatgatccagtgaggcagagtgcatcaccagatacagagtctaatgattagatcagtgaaacagcctgcctgggccatccacccctgggtgtttgtgcgatggtccccagggagaatatgtgaatggattggtgccaatgcacttcgcatactctgctgatggcgagatgttggcatttctacggagacagctattttgacagcaatgctgattaaacaattctactgactagaaatagtgtagacattttattaatcaaaactactgctctgagttttgttaaactggttgctatttaagtttctggaataataacaggagctgctaactgttgagtgtttcctatatgcaggacgtggcaataaatgtcttattttgtatatgctaatagatatagtcttcacagccttgtcacacaaagattcacattttcttgttttatagataaggaaagtgagacatgcaaagtagcttattatcattaaataactagtatatgacccatctgggctgacttcagatctgatgcccttaaccactgtaattttgagattgaccacttactatgagctaagtgatatggcaaattcatgatatcttcctgttatttaaataaggcagagatggttcctgtttatttgctgaaaatagccccatgytgtttatttcttacacatctttaaattgctttaaatatagcccaacataaacatatttttaaccatttagagcctacttactctacatatcctcataaaattacacccaacgtctgctaaccataggtaagacaaatattgtagctataaagatcccaaaccactgctcttcttcagagctctttgattgagagactayggtgctgctgagcaacatcaccgagtaaataacccccctcttcaacttgcctcaccccctgagtatcctttgatttattcctctacagagtggtggcccatgactttatctctggaaggtctcctgctgggagtgacttcccgtcccatgtcccatgcaatcttattcacatgctgcccagtaaagattgtgtgcctctcatgatcctgtctctgtcttagtaagcccagaaatacttgaactcactacattttctcatcaggactaaatcataggccttcattaatttactttgtgtttgtgttgtaacatctttatttgtggtataatttacataccataaaatttattcattttatgtgtccaattcaacaatttttagtacattttcagagctgtgcaaatatcaccacaatccaactttaaaacaattccatcctccaaaaagaaactcatgcccatttacagtaacacytgttcccatccccaaccccaggcaaccaactaatctactttctgactctgtagatttgcctatacactttctgtaacattttatcaagacaaaaagctgattttgacccagatgaaccaatttttagttatatagttactttagacatgtctaaatgatattttagcaagttcataaaggctctaaaagtctgtggtaaatatatatgtgtgtgtgtgtatccatcacagatgtaatgtaactcccttaaagactataacacttttgcatccgttcattcatctgagccaaacaatatcatgaggaaggcagaattctatggtagcgttaataggacatgcgctctgcaatcagagctgagttctatttaagctccatgggaatatagactatgtccatcaggttcaccattatgccctcartatttagctgaatgcctggaacataagagaacctcggtaactgttaggagggttaaaaaaggaacgaaagaaaataaaaaatgaactctgcgrctccccagcaagctgcaatgtaaatttcacttcactgagcctctagcatctccaaaagggggaaaatatccatctcctagagttgggaggattgaatgagatgatgtttgttaagtgcttgacacacagataagggtagtgaggggcagaggagtttagttacttgtccaatggtatatgtcgtgcactgtagtggtggaagaagggctcaaatttagacctgcctttctgcctacctgagaaagcccttaagcagtaatttagagaacgttttgacagacagctgaaatgagcacagatcattgtgactatgtgctacattattacagaggtgcagtgatggtggaattaaatgatcctacaatgtcatttttcttctcggtaatagtggtagaaaaatcccttagtgcaggcctatgtgatttcagagtccatcctttatagtaaatgccttaccttacctattccttatctccagtccataaaatggtgtttgatcactttaaatcctcttctctgcttggctttgattgcaaaatgtggtcaggttaattggtacaattaaagtgttcctgggggataattaccccttttactttctatgtgtgaagaaggaggatgactggtcccaaaaatgggatccctgtggcacactgaaaaggagaattaaatacacagtgagatgaagcccagaaagcattttctcttgtacttaatataattagccaataaaagcatatgcagtttcttatatctatttccaccaattcacacaccttggggtaggcggaaagaaatgatctggcatctgaaacaagagaaagccgatgtctgagtcaaggaagtaggagtgagcaggagggctggagaggtttttgtacatctccaacaaccttgccctcctttcccacctgacacatcaccacaccatggttattgccaggcctttctgctgagttttgagaaacaatagccgctgaccaactacctttttcttttctagattccagccctcgacacaacaggaatctcctctgaggattctgccagccataaagctcccctccccaacagctcccaaatcactctcaagcctgaagagtgctgccctgtcttcaacaccacaactacacccgggctgccggaactaaggtgtattccccagcaagatttaaagtccactcgggaaagtaatacagtaagtcttctaccttaaaagctgttatgaactgtaatgcttagcaaattggctgggggggtgggggtgaaattgcaaaacactcttttcaccctgcaacttgtatttacaagcacattatgaaacttccttgtaatcaggttgagtgacttgagcaccatgtgattcaaagacaatttaggtgtcaaagtgaataggctcatttatacaatggatacatttctcacaaccagtcaataattaatgtttcaagttgggtgcaagaaccatgtcgaaattgacatcctttaaaatgacatccttctgggtgatcaagaggaagggaaacagaagaaacttcaacaacagaatcataagtatatggcttacataagtatactacagcaagctggaatcgtctgtccattgactcctccaattatgctaaattgccagaatgtagactgtgaaaactggtaggagttttgaaataatttcacccttaaggtttcttaaatgtataattaaaaaataaggggtggaaaaggtgacagaagagaaatggctttggaaatagagcaagcgtcaccattactacatgaccttgaaaactttacttcgttctgtgaatttcagttttcttctctatgattggaagtgataaatcttcctttgtaagattattatgaggactaaatgagctaggtacaaagcgcctagcagcgagcctatcatagaagaaacgtgtactaaattctggttctcaaaccttctcaagaagagagagcccatcattgaaatgagttacaaagttccttatgcatgggaactttcctagagagaaggcccataactttcatctattgctcaaagctccaaaaggttaagaaccaccacaatagactgaacgtctcaaaggtaggaaagccccttattcatttctatatacacggtggcacattattttgagacatgaatcaagtattcctcctggaactagagcaacctgttggtttgattactaaggatggttgatttcacatctgtcctgaacccagctctgcacagggtgcagattgtagcaacagcagtattaatgttaatgactagcctttattgaactctgtatattctaggaattgggcaaatgatcttataactattaatttatttaatcaccaagcaatcccatgaggtagctatcattattattatccccatttttagaagtgagaaattgaagaagagaaaggttaagaatcttgcttagtgctacacaatcagtaaggggtggagctggcgtaggaatcaagcagtctgactaagcgtctacccaaactaagtctgagaaacatacctatcctaagggagctcaccatcaccttaattagatttttgaaaagatacactctaggaaatttggacttgacaccacccactagtgcccagctgctccctactccgtactggggctgggatgcatggcccaaggaacccatacagctggctggctagttcccgaagccacaagccgcaacagccttccccttccccagccaaggagctttactccagcggacagtaattaagcttagacttttctccctggtggaggaagcagttgcataagaataagagactcttccccaggcatttttaaactgtttcttttcttccctcttctcctcttctccaccacatcagtcaacctttaaaggtttttttttgtttgttttgattttttccttttagaggacatttttactgggccaggcccctcaactatcattgtttgtactctgttaagttttggtygtgaaaggatttgtggcgctagtcttgggcggtggccaatctgctgtgctttgcatatctgtatggtttgtgatgcaagcctccatcttgctttacatcktgggggcacggcccagtaaccacttggcaaggctttgtttagcaaccctgcctgaggggaggagccctctcaggtttgatatctgcatgttttcctagccctgtctcttaaagggccccacccagagactgggttttcttctgcckgtgtgtgtgtgtactgtgtgtattgtctgtcaaaagagctctaattaatttggcctaaagaaagaaaagcacttggatcaataatttcttttaagggaagtaaaagctgcagtacctttcagtttacgtgactttaatctttgagaaataaaagcagccgtaaagattactggtgaaatgtaggtcagatgcaaggtttccttattctaatggcagttagatatgcttctttagaggggggaatgagacagccaggtgggaggggatccctgaagaaactccaaccagcctgcccactgaggtggggcctcaggaagtccaagaagtttgcagcagggaggagcctggcccctcctcttcctgtgtggaacctgagattcaagctgcaggcaggaagtgctctagcagggactctggccttgggagagtccctgtttcccccttttcttccttttcacccaatgaaaccctgtcttactattcaatttgtctgcaagcctgaattttcatggctatgggacaaagaactccgtctttagctgaactaacgaaaagtcctgtaacaataagattatttatgatagccaaaaagtggaaacaactcaaatatccatcaacatttatacaatagaattgtctagaaaatgtaaactaatctgtagtggcagaagggagatcagtatcagtggttgcctgagatagagcaatggcaagggaggatggaggagtgattacaaaggggtataaggaaacttctgtgggtgatggttatatttattgacttgattgtactcatggtttcatgggtatgtacgtatgttaaaacttatcagattgcacacttaaaaatgtaactgtttattgtttatctcaaagccacttttaaaaatgacagtaataccacctacattccagggtkgttatgagacttaaataagatcatttatgttaaaatgccaaaaactaacacaaaaatttaacataaaaataaccatttagtaaacagaagttctaacgtaattgtaaataatggagagtcatttttttattgagcagaggcatgaaaaagcgaagaatctcatttcagccgttatagtagatcaattttagttatctcccttcatatgtaccttaacaatgaattaatgaatacgtgtcccaatgtacaagtgcamtatatatgtatctgtatttgtgcatgtgtgtatatacattaagtcctcactaacgttgtcaacaggttcttggaaattgatgttaagcgaaactatgtactraatgccatrggaccttaactcttgtctataccagcctatgataaaattggtttcattacacagcctgtcatttttgctttaaggagtagtttccaagaacttatggatgacgttaactaaggactcactgtaagtatgtatatatgtgtgtgtttacatgtatatacattcacacacatatatatgtttacactttcttgaaaagtcctttctacacagtgcattggaagtggtctactttattttcatttctattgttataaaagacctcaaggttgtttggaatcagtggaatcagcaattttccctatttttaataaaagtgggagcttattttatgctaagcattcaactatgcccttgatgtacatcataacagttttcctgggaaggaggtatcatcagctctattttacaggtgaggaagtgaaggaacactaagattaaatgatatctttagaatcacacagctagtatgtagcaaggccggggaacatattcaacataatctaacccaaaactccatagtattttagctctgcgaggctttcttcccaaattgctagatctagtatgtgggtacattgctaataccacctcagcagtcacatgtacctacaaattaccaagatgaattcaaacctagcctcacaattagtgtcacgtcagtgtcagtgaagccaaggctatggtgaagagagggagaagaatccaattcagccagccataaaaaataatcattaaatgtatgattcaaggtgagtttatagatattttaagtccaagctaatatccatgcaataggaatcaaatcgttgagacattccaaaatcttagtgctatatacaratttctggatggaatctttttagtttgaagtctcatttttgtctgtgttctctgcttttgttttgttttgttttttttttttagagggagtcttgctctgttgccaggctggagtgcagtggcgcaatcttagctcactgcaacctccgcctcccaggttcaagcggttctcctgccttagcctcctgagtagctgggactacagctgggcacatgccaccatgcccagctaatttttgtatttttagtagagacggggtttcaccatgttggccaggatggtctcgatctcttgatcttgtgatccacctgcctcagcctcccaaagtgctgggattacaggyatgagccaccgcacctggctgttctctgctcttaaactaaaattttaattttagaagatgctaaagaagatgtggctaagtgtatcaaactaatttatcaagtactataaattgaacagtttaatcctgaacatgaaattttaataaaagtgccttaataaatctttaagcacgtaaggaaaagttactataatcatattggctttaaaagagattttcattmttttatttgaggtcataatagatataagacccctagggaaatataaaaatgagaaataaaaaggtattttgtacagttatggctaatattacaatagtctcatgtctgggatgttagacctcatgctttgatcccagacaagctaagttagattgtcagccctgccacttcatagtttactgggttgcactaggcaagtgcttagcctttctgggattcactttcttatactgtaaaattttgccaatggcagcacctacctttagaattgttctgtgaattagataaggtcatgtatgttagcaaccaagaatgattcaaggtacayagaagtgtactcaacaaataggggatgctattaaaatagaatttgggctgcataggagtttaatgagtttaactttactccattgcctttcctggctgcaggcagtagtgggagccctgggcagttagctcaatgatgggtgtacccagtggcctgaggaaggaacctagaactaggttaaaggatccaatccaagttctgggtaatcaatgctaattgcacactcaactgaggagcctccagaacatcaccttggcataaaaagcatagctctgacttgacttcacttttaacaattgtttggggccgggtgcggtggctcacgcctgtaatcccagcactttgggaggccaagggtgggtggatcacatgaggtcaggagttcgagaccagcctggccaacatggcaaaaccccgtctctactaaaaatacaaaaattagccaggcatggtggtgggtgcctataatcccagctacttgggaggctgatgcagcagaatcgcttgaacctagggtgaagaggttactgtgagccaagattgtgccactagactccagcccaggtgaaagagcgaaactccgtttcaaataaataaataaataaataaataaataaataaaagtaaaataaaaattaaagaaattgagtaacagctttacaataacaatgcaaattgttaacatttttgacaactttgtatgtgctctgccctatatgaaacactgtatatgcattatcacattgcatccttaataataattatgaaataggtgctataattaccctcaggttatagatgagaaaactgctgccttgtcggaaggaaaggtgctgtttggtctcttcgctggcatccccatctttaggaattccagcccaaacaagccgccttccaattagcagtaaccgtcctgtgtgtgtatatgtgtgtgcacatgcatgtggatgcatgtgtgtatttgatggcattatatatgggctagaaatcagttaattgttctatgaagtctttctctgattaggtcctcatctattttgtggacattggttttgtatataaaaggattgtcatcagcaacccaatgatgctttttctcccaacacccatagcaacagccttttttgtgaactaaaataagtttgatacgaatcctcaaactggagttttgacagttaggtaagaaaaacagatcagtgagtacattacacgcactgtgctgtagaataatcattttaaataatgtatataaaacatcattgcattttttcctggtttacctttaaatttgttagcatgccagaaatgcaactgcctagctatcatcagtccccattccccaaaaggcaaacacttcatgggctgccagtgagaggcatcacctgcatacctgcatagagaccttctttctctagcacacaaagcttatccctgagactggaagggttgagcagtctctaattgtctagaagagccaggcctggcaagtccagaagtaggttctaggctctctcaaacctcaccccaatttaaactttggcttcatgttttatgagtctgaaggctgtatgcccagcttctgtaaagacggaaatttataagtccacaggaaaaacagagaggataaaagacagtaaaatgagataccagaaacctggtgtagagaatacataatagaattgaccccataaatgtatcctaaagcatggactcaacattccagtgtaggggtgggttgcccctccacacctgtgggtgtttctcgtaaggtggaacgagagacttaggaaagaaaaagacacagagacaaagtatagagaaagaaataaggggacccggggaaccagcgttcagcatatggaggatcccgccagcctctgagttcccttaatatttattgatcatttgtgggtgtttctcgaagagagggatgtgtcagggtcacaagacaattgtggggagagggtcagcagacaaacacgtgaacaaaggtctttgcattatagacaatgtaaaggattaagtgctgtgcttttagatatgcatacacataaacatctcaatgctttacaaagcagtattgctgcccgcaggtcccacctccagccctaaggcggtttttccctatctcagtagatggagcatacaatcgggttttatacggagacattccattgcccagggacgggcaggagacagatgccttcctcttgtctcaactgcaagaggcattccttcctcttttactaatcctcctcagcacagaccctttacgggtgtcaggctgggggacggtcaggtctttcccttcccacaaggccatatttcagactatcacatggggagaaaccttggacaatacctggctttcctaggcagaggtccctgcggccttccgcagtgtttgtgtccctgggtacttgagattagggagtggtgatgactcttaaggagcatgctgccttcaagcatctgtttaacaaagcacatcttgcaccgcccttaatccattcaactctgagttgacacagcacatgtttcagagagcacagggttgggggtaaggtcacagaatctcaaggcagaagaatttttcttagtacataacaaaatggagtctcctatgtctacttctttccacacagacacagtaacaatctgatctctcttgcttttccccacattccagttcatcatcaagagagatgaacaaagctatctcaaggcctaggttgccataaaggagtgtggaatgagtacagttaggaatagacggggctagcctagaggtgggtgcacatgaataaatcaaggggagacaaatattgtaaaagtaattataagggagattatgtttaagaaggagaatgtagaatgctatgtgaacataaaatagggtaataaaatgggataatagtatatggtgaaggcaaaagcaagtatacaaatattttttaaaagcttaatgtccatttaataaatggtgcggggagaactggttagctatatgcagaaaaatggaactggaccccttccttacaccttatacaaaaattaactcaagatggattacagacttaaatgtaaaacccaaaactacaaaaaccctagaagaaaatctaggcaataccattcaggacataggcatgggcaaaaatttcatgacaaaatcaccaaaagcaatggtaacaaaagcaaataattgatgaatggaatctaattaaactaaagagcttctgcacagcaagagaaactatcatcagagtgaactgacaacctacagaatgggagaaaatttttgccatctatccatctcacaaaggtctaatatctagagtctacaaggaacttaagtgaattttcaagaaaaaaagtcatcaaaaactgggcaaaggacatgaacagacacttctcaaaagagggcattcatgtggccaagaaaagtgaaaaaaagctcaacatcactgatcactagagaactgcaaatcaaacccacaatgagataccatctcacaccagttaagatggcaattattgtaagtcaagaaacaagagatgctggcaaggttgtggaggaaaaggaatgtttttacactgttgatgggagtgtaacttagttcaaccatcgtggaagacagtatggccattcctcaaagatctagcagcagaaataccatttgacctagcaatcccactactgggtatataccaaaaggaatataaatcattctattataaagatacatgcacacgtatgttcactgcagcactattcacaatagcaaagacatggaatcaacccaaatgcccatcaatgatagactggatgaagaaaatgtggtacatatacaccatggaatactatgcagacataaacagaaaggagatcatgtcctttgcagggacatgaatgtcgctggaagccattattgtcagcaaactaatgcaggaacagaaaaccaaacaccgaatgttctcacttataagtagcagctaaatggtgagaacacatggacacatcgggggaacaacacataccggggcctgtcggggtggaggaaaggagagcttcaggaagaacaactaacggatgctgggcttattacctaggttatgggttgatctgtgcagcaaaccaccatagcacacgtttatctatgtaataaacctgcacatcctgcacatataccccagaatttaaaataaaagttgaagaaaaaaaagattaatgtttacagtataaaatatatgtcatgcctgctgatgaccatgctaactatatggatgtagcaaacttctggaaggcaatcctgttctcttttgccctgctatgggagaagaaggccttgttaatgagctctgaacaacttctcttctatgccacggattcccagagggcttctgatacatgttagggagtctctcggacataagaggccctagagcttgtccagaaactactgtctgagtgccacagaggatccacttataattaaaataccatgattcaaatgcaaaattagcttcggcttttttggaagaaatgtgccaagagggatcctgcaggaagaggcctctggaatattatattattgtttaaatatttgtgcccatcatagagagggttgtacatccctgtcctgccctgccaggcttagctacaaaacttagtttggacagtaaataataagcagaagtgatccataccacaactgaacagaagccttgaaagcagtatactgtttgccactgcctttcttttccttctgccacaagaagagtcatgttcttgtgaggcacagctccatcagtacgggtaagaaagacgtgtgggccaggcgcagcggctcacgcctgtaatcccagcactttgggaggccaaggcgggcagatcacaaggtcaaaagatcgaaaccatcctggccaacatggtgaaaccccgtctctactaaacatataaaaattagctgggcgtggcggcacgtgcctatagtcccagctacccaggaggctgaggcaggagaatcgcttgaacccaggaggtggagattgcggtgatccgagattgcgccactgcactccagcctggcaacagagcaagactccctcaaaaaaaaacaaaaacaaaaacaaaaaaaaaacaaagaaagaaagaaagaaagatgtgtgcagacaccccacagtagacgtgaggcttgagcaagaaatcaaccttggctattataagtcatttagattttagatttatttttttgtttccacagcataagctgcctgataaaaggttattttatcaagatgactatggataccccagtggaaagttttctatgatgagctaagaaggacagctaataattgagcacttcattagtcatgaatttccactgaagcaagaccaaaaatttggctctaagcccaaagatacttactgccatctgcatataacaaagtttcattaaatataacaagaaaatacaactatactggttgcctttattaggttattaggctgcatgtgtcaaaacaactcctatctagcaactaaggagggtggtcttattggggaagaagagataatacacccagaaagaagctgaatcctcacttgacctctaaggatgcctttctctcttccccaccacttaacaaccagacccaatgtctttacaaagatagaaatttcagaatagtttttacttaggatgaatatgtggggtttccacattttaatgaagccgatgatattaaccaaggcaaacttctaaggaaaggcttcataatgttaaatccataatgctgcatgtttaaagacaatttcgaggcactatccacagatagattctcagagacataagccagcattttacatcgactctccctcctgcctcttggctgcttattgtctcctagagttttgccatgatggacagctacaacagagtcaattcattcagaaacgattgaaatcccttcatagtctagacattataggatgtctaggaacaggatgactaagggtttcatccacccttgaggagttgctctgttgagagcaagggctactaagccatttgcaattacagaactacgaggtagttctgtaattccagcctggatgagagttacctggctgagtagaagcaaagagccatgtgtgtgctgaagaagaaagagccataccccaattgctggtcagctcagggttgggcatagcactcagtatgtgataggatccaatggccgtcagaaagcactgagccatcctaagggattggacaaaaaattgtccagtccctttccatgaattgtgttatactgtaacagaggtctgcagagggtgcttcagggcagcctcttcttgttgtggttgggcagactaaagccttgacacatctacagtctgatggtattatcagagagtgtgaaaccttggggaggcagtcactggagaaaggacagcaaagcttcaagtactttctgtcaggcctctgagcccaatctaagccatcatatcccctgtgacctgtaggtatacatccagatggcctgaagcaactgaagaatcacaacagaagtgaaaatggcctgttcctgccttaactgatgacattaccttgtgaaattccttctcctggctcatcttggctcaaaagcccccccactgagcaccttgtgtcccccgcccctgcccgccagagaacaaccccctttgtctgaattttccactacccacccaaatcttataaaacggccccacccctatctcccttcgctgactcttcggactcagcccgcctgcacccaggtgaaaaacagccttgttgctcacacaaagcctgtttggtggtctcttcacatggacgcgagtgaaactttccttagttaaccagtacccag

SEQ ID NO: 93499 - DNA, 14914 bp, Homo sapiens
gcgcagtgggaagaaaaggtgctataggcagcacaggaggagggctacctccatcccccactgggctgggccaggagggcttcatggagaatgaggcgtctcagctaagatctgaagacttagaaggtggtgaccagggatgcgtgccgacggttgggggttttccagacagaatgcaggtgcagaggtctcggggtgaaagagaggccagcgcattcgggaacagaagtgttgcaagccagagtgtggggcggggaggcgtctgggaggcagaagggctggatcccacagaggccagggaggaagccccgccgaggggccccactgcacccacggacagaggagctcagaagtttgggaagggctgggctgcaggggtcagtcctggggggcaggggctcaggagagaagggagcagctggcatgtgggggtggggccagcctgcgttggggcaggagatgaccccaggacctccagtgatggtgacccttctagtgagaatgtcaagaagaactgcagagaggggagggaagagggtcagtgctgggacaggggtgggggcaagtagagttggctccacagagggctttgggcttctcatcccagcctgggaactgtggcctgtccccagcttaccagcaagacaactcagatctcagttgcagccagggtcacacacacacatgtgcgcacacacacatgcacacacacacacacaccatgtacacacgcatgcacacacacacatgtaggagcccagacaaccccccagaggccaagctggggtcatggggtccacctgccacaggcctcactgcacctttccgtgtgagagcccacccttcttgctcctccacactgtcagaccccactgggacaaggcagggctggcccaggtgacccggggactagataggaggacccagaagaaggaaactgttctgccccaggttcccccagggagaggccacctatctggggagacagctctgatttgggagaaagggagaaaggccctgttgggtgaccagctgtgcctctcgggcagggtcctcgggcctctgtgaccccagcctccctgcccatccttccactgcaaagccgctgggaccattggcagggaagctgcagagggcaggctttgcagactgcgaagcttggcaaacaggaggccattctgtgattctgccatagctcgaggggccgggggtccatttgtttgtcccccttctcccctgagcgctgctatccctgcccccaatccctgccccgccagaccacctcctttccttcccacagaggcctccgttccccgccccctacttcccagcagaaggtctggagccagacaatgagataaggggcttgttttctaagggcaggaatttggtgcagattgtgggtcaggcccagaagggctctggggaggggaaggcagcaagcctgtccatcacatgggtgtccttgggaccactgaccctgcgggtacttacaattcccaccaagctgaaggaagagagatggagagcccctgagaggtcatcaggccccggatgtagcttttgggctccatccccacccctgctcacttccccagccacgctggccctcagggccacaaacgcagcagctcctctctacccagaggcttcacccctgctatccctctgtccaaagtcggctccatcttcgaagctcagcctaatcactgcttcctccaaaaagcctgccctgctgcctggactgggactgttagagctgcttcctcgctgccatcctctcacggccagcatcttgtcccccacccctgggacctgagctctggagggcaggccacctctgctcgccctaagtccccaggcctgacctggagctggcctgtggtaaaggcctggccatgactgatctaggatgggtgtcctcctcaccaagggccaccctcaccagacgcttggcccagcagctgtggcccctcctggatctttctcctatgggggacagaaagaggaagaggagccgctgagtggcaatgggtgcctgtgctccctgtgtgggggaagggcaccccacagtctagactgtgtcagagttcaccccaaagcccccgggccctcagagttccaagctgggatcagtaacgacaatgataataacagccacagctgggcaggtcgtgatggctcacgcctgtaatcccagcactttgtggggctgagggagaatcacttgggctcaggagcttgagaccagcctgagcaacacagcaagaccttgtctctacgaaaaatacagaaagattagccaggcatagtagcacttgcctgtagtcccaactacttgggaggctgaggtgggaggttcacccaagcccaggaagtcaagaatgcactgagctgtaatcacaccactgcactccagcttgggggatagagtgagaccctgtcttaaaaaattaaaaaacagccacagtggggtgaccaccctgagcttacagcaagccaggcattggggtcagcaccaaacacatatccagtcactgaatgctcacaacagcccaatctgcagttgaggaaaccgaggcacaaagaagctacatggcttgtccaaggccacacagctggcttgaacttcagcaccaccctgcccccatggaggcagtccacccaggggcaggggcctatggaggaggggctccccacgcattcttttagcggtctccccttagactggaacccggctggagacatagccctgtcccccagcctggcacctggacacctggacactgcctggcgcaccgaacttgctcaacaaatcaatactgaagatggtaaacgagggaagctgtgttttaggggcagcatgaaacagtgatttagggctgccctctggagacagcggtaccccgcccggaccaattcctacccaagtggcctccagctgtccgttagctccgcgtctcctgttccccatctgcaagacagggatagcaatagtgcttgtctcctagagtcgttgggaggtttaactgagctaacatttgcaaagggcctggggcagagcctggcacatggcaagtgccacatgagcgtctgtgttataaaagctcgcccagggctgggtgcagtggctcacgcctgtaatcccagcaatttgggaggtcaagtcgggtggatcacctgaggtcaagagttcgagaccagccaggccaacatggtgaaaactcctctctactaaaaatacaaaaaaaaaaaaaaattagctgggcgtggtggcgcgcgcctgtaatcccagctactcgggaggctgagacaggagaattgcttgtacctgtgaggcggaggttgcagtgagtcaagatcgcgtcactgcactccagcctgggcgacaaagcgagactctgtcacacacacacacacacacacacacacacacacacacacacacactcgctcggcctcggtttctccttcaatgagcagaaccttctgcttcagcatcacgggctcgctggttctccgccgcgacgcagcccgtactacaactcccagcgtgccacggggcccgttcgcagacgctcgcgcacgcccgccgcgagggagcgcgaactacaactcccagcgtgccacggggctcgctccctggacccccggcccagggcggctgcttcccagctctaggaattctggccgcaccgaccacgtcgctctcgccgccttcgctggggagtagaggagtcagcagctcccgccggggtggggagtcgggcgctgcccgcgccatgctccgcagactggcccgagcggcggccccggtacatggggcgctccgggcggggtgtgggagcgcgggggtcgcagcctacgtggtgggcctgcgcagcgacaaggtgaccaggcccgggccggccatgaggtgcgtcatggccgaggcggtcgtgggggacgacgactacggcgaagaccggcgtgcaggccgggggtcgtggaggcggcagcggagcgctgtccgtgatggtctgggacgcaggggaagtggctcccttggcgcttaaaacccatttatgcctagtgttccattattggaacgctaagcatctgggaggtatttatgtcctactgctcaaggtcatcgccaaggtctgatggcaaaaattcaaaaaattgcaacctccgacataaatgggtgtaatgaacacctgccacaggataggcttgccgtctgcgtgcgtgctgctgttacctgaaagttagaaatgcagattccggccgggcgcagtggctcaagcctgtaatcctagcattttgagaggccaaggcaggcggatcacgaggtcaggagttcgagaccagcctggccaacatgatgaaaccccatctctactaaaaatacaaaaattatctgggcgtggtggtgggcacccgtaatcccagcttctcaggaggctgaggcaggagaatcacttgaacccgggaggcagaggttgcagtgagctgagatcgtcccactgcattccagcctgggcgacaagagcgagactccatctcaaaaaaaaaaaaataaaaataaaaataaataaataaaagaaatgcagattcacatggcctgccgagaagaacctgcatttctataggctcaccaggtggttgtgtgtgtcctgcattgtcacccagctgccccctgagatgggtgatgtccagtcttgcagaggagggttctgagatgtggagggaggcgctccaggccccatacttagtaaatggcagaaccaaggtttgaacccgggtcttctgactctgaaacccacaactgttctcctgcactgccttcccccacagaaggcaaatggaaaatagatgtagaaaggggcaggttctacaggctgcacctcgcaaggagtgggttctaataacctagggagtgtctccagggtacagcgacccccagccccagccctgggttgtgagttgccatagtgaaccactttgactgttggggtgtgcacacccctcagctaggccaggacaagccatggggtcaccagttgaatcccgagggcccgtctgctaaggggttaagggatggctggggctaagcatgtatccagctgctgcccagcgttgctggagatgctgatctccatgctcccaggcagcctcacatgtcaacaagtcactgccgctcaaggagaggctggggaggcgcttgagttgatgggagtctagagagggtgccctgggaagcagaggatggggcgaggctgtggctcacggggaagggggcttcacagaggagccctcctgcaggctgagtggaagcatcccaggcagggaagggagcgccggctcacagggcaggggtcttcaggagcagaagcagactggtgagaaaggtcttcagggcgcaggtggggatgtggcaggtgtggagagtgcaggaggctctgaggagggggggcagaggccaggtcactccagccctgagtgtcatgctaaggacttgatgccacagttggggggaccacagtgggctttacagcaagagcgggagccttcctcaccctccagctgcaccctcacaccccgtccagccccccactcatccctcctgacgaggaaaggaagtcagcagagaaaccacaggccccacctgcaaagggctgaggggaaaggaagtgagacaggtgtgaggtctgccggggacaggttcaaaccacaagagaggttcttggggggagcggggagaggccatggcccagggtaggtggggtgcagagttgactgagggccctgtggggctggatgtgtggttgctaagcccacagagtgtgcagctggtggatggggctccaaacccactcagctgctcaccggagcctcgggctaggggcctcacctgggctcagggcgtgctctggcccaagtgacacagggaaagcagcatggacggtgctgacacccgagtgtgcaagcacagcggcttccctgtccctccgcagrgctgcaagaaatggctgtggagctgctagggctggggcgcaccctctttgygccctccaacactatggccaacctcatctctggtgagcgcagggcgacttctgtctgcctagcaggtcctcagtgcatatgggggggctctgacactcrtggaccacattcctccatttctgttgggttggtggggagccctggaaggagatgggggaggaggasagtgggggctgcaggtctgctcctcccyagctcctcttccgagggtccccagggcctctgggccagcgtcagggacctctccacatagccctggctccgggttcctgcagccacaccttcctctcacccctcaggcctgttctccgggcttccctgctcctgcctcccctctataaaccgtcccatgattaaacactgccagtttcccagtgtgtgtgtgccgtctgtttcctgccagggtctgacgactgcaggtgcctcggctgcgtgtccaccaagaagcagcattgcagcagcttctccagcaggcgatgctctgtggaggggcctccaggcgcaggtgtgcaggctgggtgtggcccagcgattcccagcgcagcacagctatcctagacttgtgtgtttaatgggatggtcttctggcacgtagcactgaggtgtcttgaaggtgctgtttccttgccggcctcaggcatttgtgagttgactgtwgccttagggctcagcctagccacgctgarcagggccacatgcctccagactcaatgccaagacctgccctccttctgtctcagtgatgtgtcactgctggcgccggggctcccagctcctccttgggcaggagtgccacctccacgtctatgagcagggtggggtggctcaggtaaggagcaggcattgctcacctggggccctgggcatcctccagccagcacaggctgctcaggggcaaacccccttcccaggcaccaggctgggacctgcggaggggagaaagggacagccatggagaagctggctgggatggcagcctctccaggggaggaaggaaggagagcagagccccagatttgccacktgggggcggcagcggctggggctggccccaggcttgccgggcagacrcctgggcggtgcttggtgcctggtgccctctagtggacactcggagcactcccgcgctcccgacgggagccagacagcagcatctgaagagttaataggggaggggcccagtgccccccagctgggacgtctgtctagatgcacagaacagaggaaaggctccaaggcccaggcctcgggggagcagacacaggactcagggtctggctccttactccagaggagccccccactccgccaagaggtgcccctggacccctcagccctcatcctcttcctgacccacagagggctggagtgcactcccactccctcccagagctgccccactgcactctggactggctgagctggagaggatgatcacgcrgggcctccagagtccctaccaccaggtctgcgagctcatttgcctggagaactcacacagcatctcgggggtccggatcctccccatcaactacctacgccaggtaggcccagccccaccactgtgtgccccccaccagcctgatcctggcttcctgtgcccctggcccatcctggggttcagtcccctctgatttatgccatgggcacccatcagcggccagacctgtcacaggaaggacacatgtgtggtcctaggctgagacacaaagggaattattaccccaggtcagggcccctagtccctgcaccagcccaacagcagagatgcccccacccccaagtccccagagctgagtcccagagcagcaccaggacctgctgccctggcgcagaaacgtgtgccccatgaggctgcaggaacaagctcgtgtgagtgccctccacctggtccttgccacccacgtgcgaggtgaggaggccgcagtgtctgarctctgctgtttaccagacactagttaggcagcagcctaactctccaagccttgcgttccttgcctgtgaaatgggagcagcggcgtctccctcgagttgttgtgcagcctaaatgaggtgacacacatttacccttggcccacggtcgtttggcccatgctcagtgtgcgacaaagctgggttaaatgtgcacccccagatcctcccagagcccagcatggaggcttaggcagcacagcctgactgcttgggtcccagatcaccagagccagtcaccagccaggtctcctgatccctcctgattcctcaggcagctaagcccaggaccctcctccctctatgcctccctcaggcctggcccctctgactctgcctgcacctcacccccaggtgcacctcctggcccagacctatggggcctgggtccacctggacagggcccagctgatgaacgtggtgctggccctgcatgtcccgcccacctacattgtggagcactgtgactctgtgtctttctgcctctccaaggtgggaaagccctgggctggcctcccacagacaggtggggtggggcgycccagcaggaggcagggttggattcctgagctccatccctggcagctggccccaggttcccctttaacacctctgcagatggggctacgcatctgtccccaccctggcccaaggacagggatgtgagctggcaggagtctctcctctccacctcccagggcctgggcgccccagtggggtccctggctgggaggcccaaggacttcattgaagaagcctggcgcctccaaaaagccctgggtggaagcrtgcaccaggtggggatgctggctgcggtggccctggtgggactggttgacacaaagcaggcactgtggcaagaccatgggaacgcccagagattcacccaaggtgcctggacaggacgccccaccctcgcttccctgtgcttcctctgacttggcctgagctgtgccgtcgggggtcccccagcaggcctgcaggcttctggatcctgggactcagggtggccattgagtcactagggcgggacccagggcaccagctgcttcagcagaccctactcagcgcagagtccagcctggggaagccctcggtggacggccaggattgtgatgctctgcagagtctggcagagcctctaacctgggtcttccatctgctcactgagtcctccaacaatcccatgatgtccctacttcacaatgaggaaacagaggcccagagaggtcaataggtttgtctgagatcacatagctaaacgcagcagagcccagtctgtgtgactgcaaaggccaagtcaggacacagggcccttccttctcctaccgygaccgaactgccccctgcctcccgggtgaccttgctggcaatggggtcagggtcagggcctggggtcacctctgctcacctcaggacctggcccaggactccaggagctggtgttgtccgtctgctcagttgatcccaccttcgtggagacgaacatggtggtggtgagcatggctgggttgygggccgtgagtgctgatgagctggcccacactggccacgtggcgtgcgtgccactgttcctatggacagagcagtccgtgcttccgtgtggcacygcgacgtctcggtgtaggacactgaactggtgctgaggaagtgggagtttgtgctgaggccgttggagycctgaggacggagtgaccrggaccctgtgcccgggctggggtggaagcagggagtggaggtgttcccagcaagcaggcagcagaggaggtgttacctgctcctggggctctttggtccccttcacccccacaacactcagggttaggacctcccccatgcttgtcagcacacactgaattcctccagtgtctgggacagggtgtagggacaggaaggacacccttccagctcccgtcaccagagctcgggaggcagcggggcaggccttcgctctaggtcagagaggagccctttcttcagggccacgtggccagttacagcttcctgagttcaggaagggaaacgtcagaaggaagcagaaagggacatgggaacttgatggtcagggctttaactgccgtggtgagggatttccattttatcttgtggtcctctaatacgtattttcctttttagaaaataaattactcagggccgggcatggtggctcacgcctgtaatcccagcactttgggaggccgaggtgggtggatcacttgaggtcaggagttcgagaccagcctggccaacatggtgaaaccccatctctactaaaaatacaaaaattagccaggtgtggtggtgcgtacccgtagtcccagctactcgggaggcagaggtgagagaatcgcttgaactggggaggtgggggttgcagtgagccgagattacgccactgcactccggcctgggtaacagagccagactccgtctcaaaaaaaaaaaaaaggaaaagaaattactctgcttaacaaaataatatgtctgtattgtagatgatgtgggagtaaatcttacttttagcaactcttagggtagttcaggcagactcagtcaaaaaaaaaaaaatgaagccaggcgtggtggggtgtgcatctgtggtcccagctacgtgggagcctggggtaggaggatcatttaagtccaggaggtggagtctgcagtgagccgagatcacaccactgcattccagcctgggcgacagagggagaccctgtctcaacaaataaacaaacaaacaatctgatagtactgaagagcctgcaaggcagtcatgaattgtgaggtcaagatctgggagaagagggaacctagagaggtgagcctggcatttgggacacttttcctcgacgcgtctgctcgggagctgaggaactgagcagaacttttcacaggcacacagggctgagggcagaagctgaagttcaaggcctgctgaaagaccctggtaagagtccctcaagcaagactctgtctcaaaaaacaaacaaacaaacaaaaaaaccctcaagctttgggttgagtccctgaggggccacccactaggagtaagggcaattggaagtagactgaccatcgtgagaagtgaagccagctgtgaagcactgtgatccctgattacggcaatctggggtggtgggtgcctctggcctagctgcctgccagaagtaaagatccgtcttctctggaggaaggtgacrtctcccagagcctccaatttcctctacagttattcatgtgggatgcccccactcaatcagaaataaccaggtatagaatgggacaagatgtgattgaaaatgagaaaaaaatggacaaaagaggccaggcgcagtggctcatgcctctaatcccagcactttgggaggcagaggcgggcagatcacttgaggtcaggagtttgagaccagcctggccaacatggtgaaaccccatctctactaaaaatccaaaaaaaaatttagctggtcatagtggtgtgggcctgtaatcccagctattcgggaggctgaggcaagcgaatcatttgaacccaggaggtggaggttgcagtgagccaagatcacactgttgtactccagcctgtgtgacacagcaagactctgtctccaaaaaaaaaaaaaaagaaacagacccttaggtgacccagataacaaagtggcttgtgcctgtagtcccagctacccaggaggctgaggtgggaggatcacttgagcccaggagttcaaggctgcagtgaaccgtgatcatgccactgcactccaacctgggtgacagagcgagacccatctctaaaaaaataaatagcttgagtgtggtggctcatgcctacaatcccagcactttgggaggccgaggtgggtggatcacttgagatcaggagttcgagaccagcctagcaaacatggtgaaactccatctctactaaaaatacaaaaattagctgggcatggtggcacacacctgtaatcccagctactctggaggctgaggcaggagaatcgcttgaacccgggaggcagaggttgcagttagccaagattgcgccactgcactccagcctgggtgacggtgagactccgtctcaaaataaataaataaattaattaattaaattaaatattctaggctgggtgtggtggctcatgcttgtaatcccagcattttgggagtccgaggcaggcagattgcttgaacccaggagtttgaaaccagcctgggcaacatggtaaaaccctgtttctacttaaaagtacaaaaattagccagatgtggcacctgtagacccagctacatgggggactgaggtgggaggattgcttgagcctcccaggaggtggaggttgcagtgagctaagattgtgccactgcattccagcctgggtgacacagagagacccccatctcaaaaaaataaaaaataaaatattcaaggaattataagtcaagataaaaaaaatttggcaggaatcttggaactataagaaggccacatggaaattctagaactgaaaaatatgataacttaagaactcagtagataggttgaatagtagatgagacacagctggagagagaattagtgaagagggagataaatcaagagaaaatatccagataaacaaaagatagttctttgaaaagagtaataaaattgataaacctctaatgagactgatcaagaacaagagaaaggaagtataaataacttgtgataatggctgggcacggtggctcatgcctataatcccagcactttgggaggccgaggagggcagatcacctgaggtcaggagttcaagaccagcctgaccaacatggagaaactctgtctctactaaaaatgcaaaattagccaggcatgatggcatgtgcctgtaatcccagctactcaggaggctgaggcaggagaatcacttgaacccgggaggtggaggttgcagtgagctgagatcgtgccattgcactccagcctgggcaacaagggcaaaactccatctcaaaaaataaataaataaataaataaataaataaataacttgtgataatattaaaaagaataaagaggctgggcatggtggctcatgcctgtaatcccagcactttggcaggcttaggcaggtggatcacctgaggtcaggagtttgagaccagcctggccaatatagcaaaccccatctctactaaaaatacaaaaaagtatccaggcctggtggtgcgtgcctgtaatcccagctactcagggggctgaagcagaagaagtgcttgaacccaggaggcagaggttgcagtgagccgagatcccgccactgcacttcagcctgggcaagagagtgagactccatctcaaaaaaaaaaaaaaaaaagaagaagaagaagaaaataaaaattacctgtatttttatcatctaagaataactattaatatttttgtctatttcattctggatatgtatatatgtatataaatctctgcgtgtgtgtgtgtgtgtgtgtgtgtgtgtgtgtgtgtgtgtgtgtattaaagaggggaggtatacagtcagatcagtgctttagaaagcccttaataggaatcccagaaggaggattgtttagaatggtaaagtagagactttagcttaagattgttaactttgagaccccaagaagaggtggttaagaagctgccaggaatgtaagcacagagctcaggagggggcctggactagaggaagagctatgagaaaccacagcatgggctgggtgtggtgggtcatgcctataatcccagcacttagggaggctgaggtgggtggatcacctgagatcaggaattcaagaccagcctgaccaacatggagaaaccccatctctactaaaaatacaaaattagccgggcgtggtggcacatacctgtaatcccagctactcgggaggctgaggcaggagaatcacttgaacctgggaggcagaggttgcagtgacctgagatcacaccattgcactccagcctgggcaccagagaagagtgaaactccgtctcaagaaagaaatgaaagaaagaaaaggaaggaagggagggagggaggggacggtggaaatcttggactgcagtgagtgtaaggggagaagagtccacgtggcaggcaaaggggagtttccctctgtccctccatctcttagaagaatccagatccatactgtggaagatccgtatacaggagttcccagggccccagaactgctgtcctgtgctggagaaggtggtaactcagagaatcaaaagaaagccagcaactcgcatgcctgtaatcccagcattttgggaggccgaggcaggtggatcacctgaggtcaggagttcaagaccagcctggccaacatggagaaacccccatctgtactaaaagcacaaaaatcagcagggcatggtggcaggtgcctgtaatcccagctactcaggaggctgaggcaggagaatcgcttgaacccgggaagcggaggttgcggtgagccgatatcacgccattgcactccagcctgggtgacaagagcaagactccgtctcaaaaaaaaaaaaaaaaagaaggaagccagtaactctaagcccctgtaattccgtgtctcccttactgccctgtctggggcaagcaccagcaaaagtgcattatattggttatccattgctgcataacaaatgaccccaaaacatactgccttaaagcaacaatcattatttcccatagcactgtgggttaggaattggagagtgagccgggtgtggtggctcacgcacacctgtagtcaatcccagcactttggaacgccggggcaggtggactgcttgagcccagaagtttgagaccagcctggccaacatggtgcaactccgtctctacaaacacaaaaa

SEQ ID NO: 93500 - DNA, 12605 bp, Homo sapiens
aacaaaagtggactatatctcaatagaaactcctcatttgggtagtgagattgataaatactttattctccttgtcattagaacaaaaagaaatctcaatagggttaaatcccttaaggtatgtcttggattggattatcgaaccagctcagcactgcctctttcctgcctcatgcctctgatcccctaccctaatgaaagacctgaggttctcccacagcatgaccttctcccttacctgcatgcctcggtgaaccaaccttctgcctgcccactccttgtacacacttcaggactcagcataacaaaagattcaccagaaagtctgaccttccagacatcttatccctcccacagaaaaagcaaagtcttattcagctggccatttctgactacatcattgtaattttaactgtttatcacccttctcccctactagtctggaaagcaaggatcttcttatctatcttggaatttcagagatgagcactttgcctagtactaagaggtgctcaatcaatgatgttaattaaattaatgaacacacaattaaacacttttcagggaaaaaaatgcagagacaaaacaatgtctttaaaagacaagccagagtcatgtctgctttttctaatagtctatctcaaaactgctctgtcaccttcccattgggaagagtctaatggcagagataatactaatcacttcccatttgcatgcaattgccaattttcccgggctgcatttggctggtagcaacggagtctaatctggtcccatccattggagagcattccattgtaatagctgtcttaacaagttgggaatgtgtcacacacaagctacttatttctgcatcataaacttctaatgtttctttgggctgatagagttttgtgtttcctgaatttgggagattagccaaatattcttttcttcttgtcaatgttttagattgccccctcaccttgtgtcaccctcctgtcccagtgctcactggaagtctgggattgttggagttagcagacttttttccaagatactgttccctccttaaaaccaactataagttactagatgttgactgaagataagaggtcagccatccatggagtttatgccacaggtctcaattttggggcatgcttagatcgatccatactatcactccccacttcaaaacctgccaatacttctccctctaattctctaggggcagagggtgtaagcacatgatgtggcaggaggtggagagtagccctcagcactgagctgcagatggctatgtattgaaatgggcctgggaacacagaaatgaataggacatgatgctgaaccccatggaatccagcatctaataaggatacagataattaaattacaatacagtgtgataactgctaacataggggcaagcatatactctttcatgccatttcttattccgctggcacctaagtagagtggactgcagtgtgtaaaatgtattcccctgctcccttcgaatatctactaattatttgttccttcagaaggctgggaccacactgttctttcatattcattggttatagttatcaataaaggtcagacagagaggagaaaagagctatgacccggctctggattcatcactaaggaattcactctctacctatgtaaaggaagacactctcatgtccttgccctcaaagggctcttggtctgctgggggagagagaaatgtgacatgtttgccctcaaagctttctagatccagtagggcatagtgaggacaaggtaaggtctgcattaaagtgcaatgtgtgtgtgtgcatgcacatgcrtgcgtgtgtgcatgtatgtgttggaggggtaggaggagggcagaggtttcttgagctatgagttgggcagtgtattagtccattctcacactgctataatgaactacctgagactgggtagtttatgaagaaaagagatttgactcacagttctgaaggctttacaggaagcatggctggggaggcctcaggaaacttacaatcattgtggaaggtgaaaaagaagtaggcatgtcttcacgtggcagagcaggagagacaaagagtgaagtgggagttgcaacacacttttaggcaaccagatctcatgagaactcattcaccatcatgaaaacagcaagggagatgtctgcccccatgatccaatcacctgccatcagatcccgcctccaacactgaggattacaattcaacttgagatttgggtagggatacagagccaaaccatatcatttgtccctgccaaaaacttatgtccttctcacatttcaaaacacaatcatgtatttccaacagtcctccaaagtcttaacttattccagcattaactcagaagtccaagttcaaagtctcatctgagacaagacaatttccttttgcctatgagcctgtacaatcaaaaacaaattagttacttccaagatacaataggggaataggcattggataaatgctctcatttcaaaagggagaaattggccaaaacaaaggggctacagcatccatgcaagtccaaaacccagcagggaagtcattaaatcttaaggctccaaaataatctgctttgactccatgtctcacatctagaccacactgatgcaaggagtatgctaccaaggccttgggcagattcatctctgtggtgctgcagggtacagcccttgtggctattttcacaggctggcattgaatgcctgtggcttttccatgcacacagtgaaagcttcaagctgtcggtggatctaccattctggaatctggaggatgatggccctcttctcacagctccactaggcagtgccccagtgaggactctgtgttggggttccaaccccacatttcccttctgtactcccttagtagaggttctacatgagggctctgcccctgcagcagacctctgcctggacactcaggcatttccatacatcctctgaaatctaggcagaggctcccaagtctcaactcttaccctctgtgtatgcacaggcttaacaccatgtggaagctgccaagatttatggctcgcaccctctggagcagtggcctgagatgtatctggggccatggctggagctggagtggctggggcacatgtagcagtgtcccaaggttgtgcacggcagtggggccctgggcccagcccacaaaaccatttttccctcctaggcctctgggcctgtgatgggaatggctactgtgaaggtctctgaaatgccttccttgcattttccccatcattttgtctattaacctttggctcctctttacttttgtaaatttctgcagccggctttaatttctcccctgaaaattgatttttcttttctactgcatggtcaggttgcaatttttccaaacttttatattctgcttcacttttaaatataagttccagtttcagataatctctttgttcatgaatataagcatatgctgttagaagaagcaaggctacatcttgaatgctttgttggttatagatctcttcaacctaaatcaactgagactgggtagtttatgaagaaaagagatttgactcacagttaaaaattccacagatctttagggcaggggcacagtgcctccatcctttttgctaatgcacaacaaaagtgactgctgctccagttcccaaagttcttcatccctatctgagactacctcagcctggatttcattgtccatatcactatcatcattttgatcacaacaatttaacaatactctaggaagttccaagctttccctcaacttgccttcttcttctgagccctccaaactgttgcaacctctgcctgctaccctgttccaaagctgcttccacattttcacatatctttatatcaatgccccacttcctggtaccaattttctgtattaatctgttcttgcattgctctaaagaactacctggatggggtaatttataaagaaaagaggtttagttgactcagagttctgcagactgtaaggaagcatggctgaggaggcctcaggaaacttacaattatggcagaaggtgaagtggaagcaagcacgtcttcacgtggtggatcaggagagagagtaaagaaggaggtgccacaaacttttaaacaaccaaatctcatgagaactcactcgctatcatgagaacagcaagggggaagtctgcccccatgatccaatcacttctcatcaagcccctcctctaacattgaggattacatttcgacaagatttgggtagggacaaagagccaaaccatattaggaggtgaataaatgtttaccaggttaaccgatagacaaaaaaaaaaaaaaaaaaaaaagatattctaggaaggatggatctggaggtctaggcctgatggctctagctgtttatagtagtggagatgaagccaagtgggctagtacttcttcagaaaacacaaaatacgtaatcatagcaaatatatatgacaggcattaacactccaaaggtcagggtcccaaggtggtcaaagcacagaggtggtgaatccaggcagtcttcacctaagagatggcttcacctaagagaagcgcaaggccttagacaccaaaaaagcctgtagagtaaacatcttacctcttcaggggtggatggtgacaaggcaatgtagaggctttaggaagcatagctcctgggcacctggaggatggagggccacacaggagcctaggggttatcagcagatatkcacrccttttggcaggttagggaaagatttgaagagtcagtgttggaatactgagaatgtgaaggaaaatattgctgagatccaccaatatggctaaagggacagttgctcaaaatgctgaagctccctgtggcctgctttggccaggactggctcaggaactgcaggaaagcactgggggacacacatgtggagacatggggtggctgagggagaatggacctctcttcttgagtcaccacctccattgtgttattctttttcaaagacttagaatgagttcctgatgcctcgccctttaagctcaaactcccctgagcggccagctgggaccttcaaattagacccatgtttcctttacagtcttatttctcacttttaaaataacatttgagaaatgttcccagaccacagcaggctcatttctatctaggattttggttttcccttcgttttcactttaaatggctggaatgactcgctcactacttatgtaaatgatattcatcattaaacagccagtcaagccctacgtgttttccactcttaccttcagttattttctctcaatgatttccaaaccaatttagcccatgtgtacacatacttctcttgtacgatgacacactatttaacatctaattattcccagattgtttagaagatgttagctttatctccttagatagataataagctactataataacaaggaaacaaaataatagtaaggaaacaaaagtttccttttctccccatattctcagtcattacctagtacttagcacaacactgcagaaccatatggggctagatacaggcataaaaattggccagataactgaagtaatttagagacatagatctgagttccactggacacttaataacttatatttggctgaaaaatgtgtagatccttcttttcattctaaccactcatatgagttctcatggtttatcatgaagtggtttttttttaaatccaccatgatcatttttcacatttcctattatatttcatgtgagttttgggctgtctaccactaccatccacaaatttggagtagagtaaggtcagaaacagtgatgggtaataaacataaagtttttttcgtctttgtagttcaaagcattttctctattgtgttatgcaacttggacctcaaaagccatttgggaggctgaacattctgaaatcattctcggctgttttgcagacaccagcaacactggtagccccatactatcagccatgatctaccccaccgtgttcttccacatcaccatcaatggcaagcacgtggaccgtgtctccttagaactgtttgcagacaagtttctgaaacagcagaacacttttatgctttgagcactggagagaaaggatttggttacaagggttcctgctttcacataattattccagggtttatgtgtcagggtggtgacttcaaacaccatratggcactggtggcaagtccatctatggggagaaatttgatgatgagaaattcatcctgaagaatacaggtcctggcatcttgtccatggcaatgctagacccaacacaaatggttctcagtttttcatctgcactgccaagactgagtggttggatggcaagcatgtggtcytggcaaggtgaaagaaggcatgaatattgtggacgccatggagtgctttgggtccaggaatgtcaagaccagcaagaatatcaccattgctgactgtggacaattccagtaagttggacttgtgttttaccttaaccaccagaccattccttctgtagttcaggagagcacccctccaccccatttgcttgcagtattctataatctttgtgctctcattccctttgggttccatgttttccttatttccttccagttccatgttttccttattcccttccatgccaaactgtattgaagaattaagtttatgattatgaaaaaaacctaaataataacaacaacaacaacaaaaatcattctcatttttggtctgagtgctgaggctgtctgtaaatgagtgagagaaaaaatttgctttatgctaattccaagtagaaatgaaaagtctatcaataaccatgatggtttttggaaggcttaggtcacgatgttcgrgtgatcatagtcactctgctcagctctttaatttcaccaaagccttgatacatatgttactactacttctgttttatagaagaagtctaaagtgcctcagaattgcctgtgacaaggggaacaaaaaacaaaaggtggcactttggcagaggttacagctgcggcatatcagtcacattcaccaaatgtcatcatgggttggagctgtcggttcacagtccttttgaggtagtgtgagaagtagaggtctgggatgggcaggcctcctgtagattccacccacagtttcctgggctttgtaactgagagcaaatcacttaatctttctgtcagtttattcatcagtacaatgcaaggtgctaataacacccactttgcaagataatttatatttgtatatggcctaacacaacatcaggcgctggtagacacccactggctgtggctataattattaattcaaataatgtagttcatagagctaagatgaaagaaacatcatattgaggaaagaacaaagactttggagcaaaatctggttttcaattctagttcttctgcttattatcagcaaaggttggtaaattacacatcaactctaggcttcagtttcctcatatgtggaatgagggtagtaagagtacctaccttaaaggattatcatgcagatttaaagagcaaaacatgtaaaatcccatgaatagttcctggcatattggtaaagcatataatgaatagtaactgctgttaattcacattcagatcttaaagaaaaaatagtatttctaagcccatctctctatgatggatccagggaatcaaaggtgaatgttgttcttacagaggagggtgagaattttatcagcgatatactaacaaatgtttaaaaattagctaactatacccacctcctcactagttaactcctaatctgtagtgtttgctgatttccatggtataaacactaccagtgtgatgtcagtgaacacagagctggcaggagatgctaacaagctgccactggatttttttcatcttcctgaacccacataatacacaagagctacaaaatcacattatctaggttgccccatgtgatatactgataatatatatttatataaactcttatgactgagaattccgactgtggtgaagtagtcacaggaccgggaatcaacgacttgggttctagtcctaaatttttagggatgctgtgaccttggaaaagtcacttaacccctttaagactcaacgaagtctgaagcccagagagtttctaagaccctttccaactctaaaagccaataatcaataattctagagatacagctttccattgcttattcctaggtcacatgtcttttttatctagagacaaaatggacagaatggattttaacaagctctgtaggaaaaaataaaagtcttttatctgtatagatcctggtgaatatttgttctctgtgaaagggattttattgaccattacaaaagtacattctgaaaagagcctcaccagtgattagaaatttgaattaagtgggtcttaccttcttttcatgcttgtcatgtgatttaatgaaataatacaactcagggaaggagtttaaagagcataaagtgctacccactgttaaggtgttaacttaaacaggtcttttctacattgcaaaaatgtcattatgctaaaataaaagtaagtttaattatcttttaaacgtgtacttcaagctgcactgtgagctgttctcaatatctggccacaaaataaataaattcatgcaatatctggccacaaaataaatgatttcaaaagaaatgatgtcatattttaaataattaatgatcgacactttgagtaatatacaaatctgatgctttgcaagaaatgtttgttaaaaaaaacttactataagtcaattttattttgttttgcataagaatcatgctatcagacatttcagtgctcttggcactgaggtatttagaatacaacagaacagagagaaaatgttaattgaaacatataaaaaattgtctttgatgtaaacattattattaagtagtttatctagcttagacatttaattataccagaaatccatcgatgatttttctttcctttttgcaacagaaatgctcaaaagcattattttggaaacaccaaaacaatccactgattttgttatttcagagtaacagtttgttcattcagtgaaccatctatcaactgttaggattgaactaactagattattttacttgctatccatccattccacaaatatctgttgagcacccacctatgtaagacacttttagacactggggatatagaaatggatcagattgcatcctgtaatgagttcaatggtggcctctgcaaaagatatgtggaggtcctaattcccaaagccttatttggaaaaagttccttacacatataattaagaatcttaagatgaataaatacttctggattatcaagataagactaattccaagaacaaatgaggcaacatagctacagaggcagagattggagtgatgtggccataaatcaagaaatacctgcagctaccagaaactagaagagaaagggaattaattttaccctagaattttcacagggaatgcagctctaccaacatcttgattttggacttctgtcctccagaactatgacaataaatttctgttgcttaagccaccaaatgtgtggtaatatgttatggcagcctcaggaaactaatgaagatccagtctccaaggaagataacatatttctttctatattatattgtttttaaatgcaataagattggttacagtaggaatttggagaaagaagagatttctttctactggggggtatcaggacatagttactaaaggaggaaggatttgagaatcctcttaaaatgaacagaattgtgatttagaaagactgagcttatgatgatggtgctggaggttggtgagcctgggattgttgagtagatgtgttttgggtatgggtggaggtgggcagtgaattccaggcagaaggaaacttacaattaaaggtccataggctgtcaggtgggagacctatccagagaggaaggcagagttcaattaatttgcaaacggaagagccacaaataagacacataagaaatggccttatgtgtccagttagagtgtggatttcattttataatctatagaaaatagggtggtttttaggcaggaggatgacaaggtaagatctatgttcaggaagaatctctggctatggtataatttagagaagaaaagtactgaaggtagggagagactggttaggaggagataacactatattgcaagaaactagggtgttatgggctaaactgtgtctcctcaaaattcatatgttgaagtcctaaccccagtatgtatgtgagaatgtgactgtcgagagacagcatcttttaagagataatcaaggtaaaatgacatcatatgaatgggctctaattcaatatgactggtatcttttataaaaaagaagagattaggaaacagacaacacacagaccaaggggtgaccatgtgaggacatggagagtaggctggcatctgcaagccaagaagagaggcctcaaagaaaccaaatccacttacaacttgatcttgaacttctagcctccagagctgtgggaaaataaagttatgttgtttaaaccacccagactgtgatattttattatggcatccctggcaaactaatacaaaagatttcccatgggtgttttgcaacaaagcacaccactcaacatggagatttttgatgtgtgttattatttgctctcttagatagagttgtgtctgaccttaatataaggacactcagtttagtttcattacctcccaaaaggaggtatacaattgccacgttccaactccaaaagcgtggtgcatcaaaaggcacaacaataataccaattttatagttgctataatatcgcttcttttcagaatatgtaacagaatctcttttgcttcacaaactccatgcattttgttcctacctttctcataaataatgatactgaacagatgctaccttcagatatttgttgactgagttatgaaatattcccattgcctgagcttctgggcatccagatacaataatctatcttaattttccctttcctaatctgtccaaaatgtactcattagtgaggtctgattaagtgtgtgggctttgccctgaagatgtacagcagatgggaagtgaatgagaaagatatggactacccctgtagttcatattgcaggtttctaactgagaagacaatattgttcatgcatcaggatgagcagtataaaatgattcagtcaaaaaagtggcttatctgttagagttgagggcaagagccctaatggatgcccattcagatttcccaacagaagttagtgtgatgttctttagcgttctgcaatggggaagctacaacttgtggaaagcaaaggagatcagaaaactcaggccagtcttgacttttttcccatttacacatttttttttttaaagtctcatggaaaacatagcttctgactgtttaaccctgttctttttgttatggtcagccataaggctgactgtgaatccattgagcgtccagcaccatgctagatgttctagaaaagaaggaagaatccgggctcttaggaagctggtgatcaatctggaaggcaggccaaatacttaacaccttatcaattattttaaattagtatggaacagaatgagctaaatatgactggctggctgtggggtactcaacagcagatttgggttgatttggttacattcaacacgtgaatctcattatttcctaatgcacactcaactataagccaagtgatatgggagttacacaaaggttgtaagacctttctctgtcccaaaggacgcttaggtcacctgagtgactaagacttaggtgacgcaagcagggaaaaagtaacattgttcaaatgaatgatgtcactgtgtgctagagaatttagaattcagaaaattaagaggacagtataagccagtttagctgtaggaggcatagaaaataaggcttggtatacacattaatttatttattatatgttacattaattatagataatttttatatatttattataatttattatgcatttattattcatatatttttcattcacacagcaaacattatatgtcatgtacaatattccatgttctgataaaatggtgaagaaaactgaaatggtctctatccttatggtgtttatagtttaagaggagagacaaacattagtcaactaaatgaacagatattaaattatacactgtgttaagtgccttgaaagaaaattattacgggaaatggtctggagcagagtggtcagaccaatgtttaatcaaacatccaaaggatgagtaagagatagttaggcagtggaggtggggagtattctaggtatacgacatggcacgtacagagagagacataaggtggagaaggaaggcaactgcccagctgcaggaaggcaataagccagtgcaattagaggactgagatggggagaattttcattcctgatgtttctggactcacaggtatatttaagatctgttgaaagctatgcatcctctctccaaaatgtgctctacattcaaaattcaggagcttcacagatttgca

SEQ ID NO: 93501 - DNA, 12267 bp, Homo sapiens
  misc_feature (1)...(12267): n = A,T,C or G
tacttattagggatgccttgttctattctgtgagaacctgattcttattcctgtggccagattctaaaaaaactgaaaaatacttagactacatgcactaaatttattatttagagtttatgttagaaaccgagcacactaacattaagaacaaacaaacccatatttttagtttcccaagtctatctctgaaatatcaacagcacctttctatgaagatttttctttcttgtaaaggagttctctgtcagctggaaagaatcatagaggtaggccagcatgcctcggtctaggtccccatttacagagagaacacaaggaaccacattttttcgtccatctcggcccttcacagaaaaacagaagaaaaataatcatttcacagaactttttttgtttgtttgtttttgagacggagtctcactctgtcacctggccaggctggagtgcagtggcatgatctcagctccctgcaacctctgcctcccaggttcaagtgattctcctgcctcagcctcctgagtacatattttagacttacacaatcagaatacaaaagtaaagtttcattttacaaagcacccactctgtaccaggcctgtggtaggcactgggcccacgaagacgataaagatgcattctctgctctcactgagctcagtgtttcatcagcgaggcccaaatgtgaattttaaaactatggtgcttggttgggctctatcccagagattctgaacgaactcaactggagagggacttaggcatcaattttttcaatagccctacagactatttctttaatgcttccgagctcagagttagtattcagaaaggtaacactttttttttttttaatacagacagagtctcgctctgtcacccaggctggagtgcaatggcatgatctcacctcattgccaacctctgccacccgggttcaagtgattctcttgcctcagtctcctgagtagctaggactacaggcacacaccaccatgtctggctaatttttttctatttttagtagggacggggtttcaccatgttggccaggttgttctcaaactcctcacctcaggtgatcagcccacctcagcctcccaaagtgctgggattacaggcgtgagccactgcgccctacctcgaaaggtaacacttttaagtaaaaattgtttgctgattattcaaaagaggccttagggaaaaaaatggtgtgctttagggaaaggggtttggagtataattttctgaaacgtaaagttattttcataaaaaagaaatctttcaaaaacttactttttgcattaaagccataattatgaaaacaaactacacatagtacatgatatgaattaagtattgataaacagacttacttcttctctaaactgaagaggaatcatttcaaacttcttaaaaatttcaatcctagaaatttcttaagttttggataaaaacagttccactttcatctttctttttttgtaaatcattgttcacctggatattcatgtaatttttaaaaatacttaaataaccacctttagctagagtcacagaacaaaaaaaaaagagagaaaaccccacaaatttaaatcctcagcttctgttaattattcatgatcaaccacagtcttcattaatacatatatgtactgacattttaaacctatttgaattgcatatgatactttaaagattcacaagaatttgccctcaaaggcagtaaactttctgatacctgggactctattctaccagttgtatttcacacagttatcgtcgaactgatagttaataagataaactgggctgggagcagtggctcatgcctgtaatcccagcacatcgggaggccatggtggacgaatcacttgagttcaggagttcgagaccagcctggccaacatggtaaaaccccacctctactaaaaagacaaaaattagctgggcatggtggtgcatgcttgtaatcccagctactcagcaggctgaggcatgagaatcacttgaacccaggaggtggaggctgcagtgagcagacattgtgccactatactccagcctgggtgacagagtgagacaccatctcaaaaaaaaaaaaaaaaaaaaaaagacaaactcaagtactgaaagattctgtggtgcgctttgaatcaaacaaaatctaaatctgaatctttatgaagaatgctttaggctgggcacagtgactcactcctgtaatcctagcactttgggaggccagggcaggaggatcacttgagcccaggagtttgagactagcctgggcaacatggcaagatcccatccctatttaaaacaaacaaaaaagattgtttattgttttctaattttttgaaaattggatatccaacaatgtcaggatatctggtggcaactcttccaacaatatctgatttctcacactatccagaataaattcttttctatcctaactgttcttcagcctttattggtctgcttcactgttctctaaaaaatatatttggacattaaccataaaatcaactaaaaacagatacaaaatggcctaagaggctgggtgcagtggtttacgcctataatcccagcactttgggaggctaaggcaggaggattgcttgagcccaggagttcaagaccagcctgagcaacacagcgagaccccatctctattaaataattttaaaaaaagaaagaaatggcctcagaaacatttcaagaaagcatactaaatgacagaaattctacttaatattttataacatgttcaactaatgataaataattttgtgaactctggaaacagaaaaggaacaatgtcatggaagagaaaaatttctgcaataggaaaactcttcattagtgaaaatgataccaataaaagaacaaaataatctgggcatggtagttcacacctgtaatcttagcactcagaaaggcagaggcaggagaacagcttgagcccaggaattcaagaccagactgggcaacatagcgagaccccattcttcatacaaaagaaaaaaaagaacaaaataagacactaatagccacaatacaaaaatcatctttaaatccctagtcacaaggttgagctgttcgttaactatgataataaccaataagtttcatttgagagctgagtaccccaaaatgaagtgtgatggtggtggagttaaaggaaaatgttcaccagttaataagccttctagtttttcattagttattcatatttaaaaattccagcctggtcaatatggtgaaaccctgtctctactaaaaatacaaaaattaaccgggcgtggtggcgcacacctatagtcctagctactcaggaggctgaggcagaagaactgcttgaacctgggaatcgcgacactgcactccagcctgggcaacagagtgagatgctgtctcaaaaaataaaaaaataaaaattaatctactttctactcattatatataaactcctatgtttttgctatatattttttctttttctttttttttttttttgagacatggtctcatcctgttgcacaggctggagtgcagcagcacagtcttggctcactgatgatcctggaacaatatattgctacaaaaggtaaggaagtgctcgtcaagacaatgatggaaatatgtcaaaaggacactggccaagtctaggacaatttgaccatcaaaataaataatgacagtaacacactgtaaccccctgagaaagtaatctgtgaaataccaatttaaaaaaaaaatggaggagaaggaaaagctctacagtatattgctgaccagtaaatctagaaggaatgatggaatttgtttttttttaaaaaaaaaaaaaagggaaggggaaaaaaacaccattggcaaacctcatcgtagtaactgatttgagcaagaatcatcaagggatgctgcaaccagtaaggcaaaatttggtgacatggccaaacatggtgactcattcttataatccaagcattttgggaggctgaggcagggggattgtttcatcccaggagttcgagaccagcccgggcaacaaagctagaccccgtctctacaaatattaaaccatcagtcgggcatggtgatacatgcttgtagtcctagctacttgggaggctgaggcaggattgcttgagctcaagagtttgaggttgcagtgagctatcaccataccactgtgtttcagcctgagtgatagagtgagatcctgtctcaaataaagaaaaaaaaaaatcaccatttggcaaacctcacattagtaactgatctgggcaagaatcatcaatggatgctgcaaccagtaaggcaaaatttggtgacaaagaaattgtctgcatcatcttaaagtatctgcccacaacacttattaattactagttaatttttttgttttttttttttgagacagagtctcgttctgtcgccaggctgcagtgcagtggcacgatcttggctcatcgcaacctccacctcccgggttcaagcgattctcctgcctcagcctcccaagtagctgagactataagggcaagccaccacatccagctaatttttgtatttttagtagagatggggtttcaccacattggccaggatggtctcaatctcttgacctcatgatcctcccacttcggcctcacaaagtgctgggattacaggcgtgagccactgcgcctggccgttaattaataaatacaaactatttattagctttacactggagaaatctagtagaaaccatcttaactaaatgataaaagttaacatcaccagtaacactcctcatatgacacactgagaagagagcttctcagtactaccacttctgtagtactcccgacaaaaatacataaatcacgtggaaacagcagacagatcccagccaaggcatattctacagattaactagactgtactcttcaaaaatgtcaaggtcacgcaagacaagaggaattgttcatttgaaggagtgtaaaggcatatgacaactacatgaaagacaagatcttggacctataaatgccattattgagataatcagttcaatttgtagggctctgtggcaatagtggattactgttaatttcctgattttgatgactggattgtagttatgtaggtgagtgtctctgcatctgaaaaatacacaatgaagtgttaagacaccacgtttgcaccttattctcaaatggttcggaaatgattatagagaatctgggtaaaaaatacataggagctccaggtaaaacatacatgtaatttagacacattgccaggatacatgtgtaaaagttcgtgatctcctaggttccacagggtttctattaactcctttccccagggaaaattgtagtaaagtttgtttcctttccggccttcttcatcctgacagtcactgctgctgaagttagatggactcatggcaaactggaaaagaaaatttaagtttgtcttaacatatttaaataaacactaatttaactcccataattatctgtaagaatttaaattgtccgatactttttattcagcaaatgtgcgaaactagtcaagtcccgaatacaaattttaaagtttattctaatttacatttttttttgagatgtgtctcattctgttgcccaggttagagtgcagtggctagtcacaggtacaatcatagctcactgctgcctcctactgctggcctcaagcaatcctcctgcctcaggattcagagtagctgggaccacaggttgctgaaatttaatttttaaaaagtgaaaatactggccaggcacagtggctcacgcctgttatgccagctctttgggaggctgaggcagggggatcacttgagcttaggacttcgagaccagcctgggtaacagagcaagacttcatctctacaaataataaaagaagttgcagtgagctgtgattgtgcaacggcagtccagcccgggcaaaagagtgagactatgtctctaaaaaaaccaagatggagtcagttgtaccagtgaaggacaagaaacttctggaggtcaaactaggggagctgccaagctggatcttgatgtgggacttcagccctagtggccttgatggagcrtttcaaagaggttactactggtactacaacargtacatcaacgtgaagaaggggagcatctcggggtttaccatggtgctggcagggtacatgctcttcatctacygcctttcctacaaggagctcaagcacgagcggctatgcaagtaccactgaagaagacatgctctgcactcccccagcaaccttcttggctgcaacccctccataagcaacacaatctcgattgttgctgaatcctttcatatcctaatgggaattaacctccaaataaaagatgactggtacttgtgaaaaaaaaaaaacaaaaaaaaaaccaaaaacagacaacaaaaataaaataaaataaaaagtgaaaatactgagtatattgcttaacatattgttttttagtaggaaagaactacagagaaaaaactgttgatgttatccagacttttatggccaatgaagaggggaagttaaccatgactaaagtgggataaagaagaaagtatcacatagtcctcattcttacccttctgcgaagttcttgatgactcgtgattatttcatacagtttaaatgggtatttggggatgtttgagtcgggaaatggtaacataacacatggcaagacaaaaatgcttacttcaactctttttttttcagtgagtactaaaacttgatcatcaattacagagccattttgactaatatggaaagttcatggaggtaggtagcaaaagctgaagctgtgacaatggtcaagggtcaaactctacatcagccaggaatgctaggtgagggctttgaattttaccttacacagaaaggctaattaacaaacacatctgagcccaacaaatgtttttaccaaagtaactttgtaatctagaacaatgaaaattgttacaaagagtttttgtatttgtataatatattaatagctacatacatcaaatataatttcttgtatgtcagaagaattaccactgacacattaagacaatttatgtattaactattaaattaaaggtaattattgcagtacctttctccaccactggagtcgatgacgtaaccagaaatcaagccactggtttgaagttctcggaggagtaaaccatactaacgaagcttcagtcttctcaccaatactttagatataaaacgtatcaggaagttagcttatctgaaaattatataatttatcccaagtggaaatgactggtttttgactatttaaatacaaggccaagttatttgccactttttataccttttaacaccatttcgtatctgcttagtgtcaaaaacaggatgaaaacacactccaatctgagcaaggccataaggtagcctcttgtttaccagatccaggcaattaacatagtgttccaaggcacctgtcaaaagataaatcaatcattgtatacatctagtccacaaacccaaatcatttttgtcaatagacacattaatagtagtaataacgttaacacagcataaagacagatgttggctaagcttggtggctcacgcctataatcccagcactttgggaggtcgaggtgggcagattgcttgagctcaggagttctgagaccagactgggcaacacagcaaaaccccatctctaaaaatatacaaaaataagccaggcatggtggtgtgtgccttgtagtcccagctacttggaaagctgggaggtggatcactttagtctgggaggccaaggttgcagtgagctgggatggtgccactgtgctccagcctgggcaacagagtgaaaccctgtcttaaaaaaaaacaaaaaaagacagatcaccacttaattctaggtagtttcaccctgagtttttagtttgaagattttcttttttttttgagatggagtctcgctctgtcgcccaggctggagtgcagtggcagggtctcggctcattgcaacctccgcctcccgggttcatgccattctcctgcctcaccctcccgagtagctgggactacaggcgcccgccaccacgcccggctaattttttctgtatttttagtagagacggggtttcaccgtgttagccaggttggtcgcgatctcctgacctcgtgatccgcccaactcggcctcccaaagtgctgggattacaggagtgagccactgcacccggcctcatagttttaaaattgaacaaaaaaagacactttaaagattgtaagggtctgattgcctcaacaccataacttaattaaaaatattactgttgaatcttatttggttaatttgtctgagacaactggacctgttgtttacatgaactgtcaggaagtattaaatcagccaactagttgctgcctaagacagctatgggaagcctggtttgcatcaaaaggtcaacaggaagaaacttatggagaataacatgttatctgaagaagagagtggtatcatttgcnnnnnnnnnnnnnnnnnnnncaaagattttcaaatctataagaaagttgaaaaaataataaacatccatatacaatgaacacttgtataccctttacctagattcatcaattatcaacattttgccacatttttttcttgttcactcccaaatactgccgcatacatcttctaaaaataaaaatatttcctatataccattataacaccataaaaagttaaccataataccacaatataatctaacatatggtgatattttagttgttccaattttcaccccaaatatcttttactgttctctttccagttaagattcatgtactgcattctgagtaggtttctttcatccatttgaatctagaacatttcccttgcctcctttcccccttaattttgctattaatgacactgacttttgatgtgagtccaggttagtcatagattgtctcacatttgggatttgtctgattgtttccttatgatttaatttcggctaatcatttttagcaaaatactacatagtagatgtgtgtatcttattgcatcataacatgaggaacatgttatcaaattattccactactgaagacaccaaatttgattacttggttaaggtagtaaatatccactccccaataatatcctgctccccaacagtatttcacccagtattttagaatccattgatgactgttgcttgaatcaatgatatcggggtttgcaatatcatgaaatggtgaattttctaatgtatctttccttctacatttattccatagcttctgtaaaaacataagctttctctacctcttccccccgcccccgacctctagggtcaattatttgtttttgattaatactattgactcttagattttagtcaatgtgttatgatccattaccattaatatgtatcttaatgttcaatttgtcctagatgtggccagtgacaaccctcctcaagccagcatctgtgacctttttatatgacccattagtcttcaagcaattctttgctttttagcaccataaagtgtttcaaactcaccttgtactttccctaaccccagacccggaatcagccatttctcccagtactggttcatcttagaaaccaagatctggaggccgggcgcagtggctcacgcctgtaatcccagcactttgggaggccgaggcgggcggatcacaaggtcaggagatagagaccatcctggctaacaaggtgaaaccccgtctctactaaaaatacaaaaaattagccaggcgtggtggcaagtgcctgtagtctagtcccagctactcgggaggctgaggcaggagaatggcgtgaacctgggagatggagcttgcagtgagccgagattgtgccactgcactccagcctgggcggcagagcgagactctgtctcaaaaaaaaaaaaaaaaaggaaccaggatctgggcactaggtgtgctcattgctactgagggtcattgcttctaggaactttaaacgaagaaagttaggaaatatatttttaaaaatcatgaggctgggcactgtggctcacacctgtaatcccagcactttggggggccaagatgggcggattgcttaagctcaggagttcaagaccagcctggacaacatggcaaaacctcatctctacaaaaaacacaaaaattagctgggtgtggtggcatgtgcctgtagtccagctacttgggaggctgaggtgggaggttcacttgagcccgaggtcgaggctgcagtgagccatgatcacaccactgcactcgagtctgggtgacagagtgagacccatattcaattttaatttaccaattcatatttaatttaccaatccatatttaacattagtttatacgtaccttcttttacatattatctcttcttttacaatgaatatcttggttcctaataacaactaacccaactatttgaattttttttttttaagacggagttttgctcttgtcacccaagctggagtgcagtggcgtgatctcggctcactgcaacctctgcctcctgggttcaagcgattctcctgcctcagcctcccaagtagctgggattacaggcgctcgccgtcacggccggctaatttttgtctttttagtagagacggggtttcaccatgttggccaggctagtctcgaactcctgacctcaggtgatccacccgcctctgccttgcaaaatgctgggattacaggcgtgagccactgcgcctggccttgatttatcctatgatatacatgaaatagtttcagaattataatttcaacatttttacttagaataaatctaagaaaagttcaaaatgtctgtgtagttccttatgcacttagactacattgcactaaatgacagcactgtgttcagaagttgccccgtgaaattgagagcgttcccaggtccttcggacagattgtttaaggaacagcaatgattccatggaccagttttctccagggtagagcactgttaatatatccgactacttcaaaaagatgagaactaactaacttccttgcatgggaatacagggccagttgcaatccccaagatccagcaagactgcctcgcctttccacccgacacctgttttgaagcatgaaatcgtgaagcataccgtgaagaaggttctcccgtagtttcccagaagtttttaatacgttctcaagaaatgytactagctgttccttactcagctctttgtcttgcaagatttcgcgtagagtttctgcagaaactaacctgaaggcactgtccccgggtagcaaagggcctggtttgtggtggagggcgtccaccgggaatacctgctccctgaacaccaccaccgaggtccaccattctgcggccaggttcttccgcaactctacgcccaagggtccgaagccgggrtggcacccactcagaagagaatcccggctaagctgctgcttgcttccacttaggaaatgccttctctgacagatctctaacagcgcctcgcttccctctccagacccgggggcttctgggtgctcgccgttcccctcgagctccgcgtgcgacttcacatgccctcctttggggctactcctttccgtcaacagctccggctgccccgcatctactcgacccccaaacccagacaacaggcacctgcagaccttatggcaggccctgacggctacacgagagcgcatctctctccgaagttaaagagcacactctcccatcactcaacggatcccaacaagccaccactaccgttaacagaatccggagaggccacggcgcaggcgcaacggaggtgagcgtgcttgcgggcggcaggccccaccccggaagcgcatgtctgcgttccggccgcagccgtcccccgcccaccatggcggacgccggctcggatggttctctgctagcttgccgttcgcgtcgcgcccctcccttcagattgacttttttctttcctcgtaagcaccagtaaaggttattcccacctatttataaccgtggtgtagccacttgagtcacttccttctgccactgttttgcagtccagaaaattaaaatacttcagtattatccaaatcaccttctatatacacctcaatcaagcacttggactaaatttggcatttggtttccctttaaacagttttagtcctttacggtgatttgtaagcccaggccttcttaactaggcaaatgctgccg

SEQ ID NO: 93502 - DNA, 13937 bp, Homo sapiens
ctcttcaaacataatttaccaacctaagagtgtctgctatgatgtcaagtgccatatagccttcactaatggttattaagagcaaatttagagaaatgagaatggtctttattgcaatacacagagaaggcaagggaggctccattttgatgtctgacactaataacgacacactgtgaattcttgcagcaagcaaaacatcgtaaaactgtcatgaccagccccatttcctgatctgaaggccatgttttgcatacaacttgagtctttgagttcaccttcagtctgtgctctgctctgagacctgggaaggaggctgagagttggagaacttgaagaactcaagagtctaccttagttgactcagaggtgagccaggtaatctttaccagctcagaccacactggtgctggcagctttgctcctgaactgaatcttcacctctatccagttagctgggcccctgtcaggaagtctggtcctccccaagtcaatggttgacctctgctacctgtacggagaactcccaaggcctcgtgtctccaagtctctgctcccctgctggaatgcctgatttcagttacctcttacctcttcctggctgagctttctcccatcacctgcccatggcacccctgtcccctcatttcatctctacaggagcctccgattcctgttcctaacccctcacacttagctgtagttcatttccaattcctggtaagtcatgggattacaagaatgagtcaggtataaaaatttatgcaagacttgtaaagagttaggacttggagtgttctagaatttgcacgtgctttctttcctccagcttcagaaggagaagatgggatttctgcctgccttagggcaacagggcaggacgttctgaggacagccaggcaagggctgggccgtgacttgagaaacgggtgccctgggaagggtagaagccaggagggaggtggcacccatcctggaagtgtctgccagctgtgaggatgctcccactcaatgtgtgtgtgtgacagctgcacaggcatctgctaatgatttgtggtttaatatgatttaggattttatatctgtgtactatacacagtacagaataagagtttatgttaagcatatgatggattgactattagagggctttgaagacacataaatgcctgcaggagattcggagcaggcctggcccagagtgaggggcagtttgccactttctttgaggcccccaggctccctcttaatttctttataattggtttagtcactgtgggagcagacaggaaaggaggtcaattccttaggtgttttgagaggacagaggttaacacagagctccctgctcctgatcagccgtgggtaacccggaggaagacaccctgacgaatccatctgatgctggccagcaatgtaagaggcccgggctcattgtggttggagtagccttctccttctctcctccagcttcgagatgtcatgttaatgcggctatgctggtcaccctccaagaaggcctagaatctccacctaagggcactgcaggcccagggtttgcaatggaccctccatccctcatcctggactgtgacagagacatgcctgcaagtcgcttcccaacctgcccatttctgacctaacgcaagctgttgaacggcaagggtggctgctgagttttcagaattgtgctagaggccctggtaagagaatctgtgaccctgaggaagttttcatgggctccctggagaaaggggcacttctaatgattcctcaggtcgactcagcattgggtgggtcaccagccttggaattcaatccctgaatataatttgtttgactaacaaaaatttctaaaatgtgtccaagtgttccaaaaatagaagaatgtcaactcagataaaacaccaaataaagaaagtgctccatgttagctgaacttcatgtactcctggatttgtattggattgagatggataaagtcaatgagatggtttgtttctgtggaggtggaattcaacatggktttcggtcttcagtgttacataaaagctgtgggagcagagtccaggaaattgccctgtgcttccctctataagagcacttaactgttggaattgcatgtctctgtttaggatcagatgtgagcattccggagaagaggccctgtctcactcagcttggcattcctagggcaccgcctggcacccactcaaacacagtgcacgttgaggtcattaattaaaggatgactaatctatcaggtggctgctgcacttgggcgctgattaagactgtgcttgagacctttctgagtcttcttttgtaggagtccattatgagaggaaggctgacatcaggatctgcccacccaaagccccacacccctacaaaacttcagtcggtttttgagaagggctgactacctctcaccaagcaacccaaattcaggctcaagctgtgacagttaatgctttacagattatgatctaatttggaaagatgctaattttagtaaaataaatctacttcttcagaaacttgagccttgactttagagcatattttggcctaaatctctgttttgctagggcattagaatttctggcttctgtagtgagttggggtgctgaggatgggtcaggctaggaggaggatcccatatcagggagaaacacttggtttttgtgataaacaagggacggagaggctcattctgactctgcagtgtggacctctcagaactgaagcatgcagccgatccctagcagatcctagaccggggcgggaagttcataaacaacaattacgatggagagaagcatcctctccgcagtggacagtgaactcgcagggtcccctggattgccaaccctgctcatcagccaccacccttgtaggatctttgcagtgattggaggatggactcggatcttctgctgtcctcgctgggcccagagcacagaagtggctgacttgggcaaaaggcaaggctgtctttaacatttttctcctcactttcaatttcttcaagtgattactaataatatttatagcccttctatttttgcaaactttatatttataaaacacagccatatgtgttacacattaatattttgaaaatattaagctaatagctttaaaaaaattctttgcctccatgaagagcatgccctccagttgtccttctgtcttcttgaaatcatggaggagaggggggcaaatccacgttgaagagaaaaggcagagaaagtgcctcctgcaggcaggggaagaaaagagagccctttggcctggagactgggagggaggagaagcgagacatcggagcaatgtgtcttggcttccgctgctgtttacagcgcacactgaaatgacagagcccaggaaggctgttggacaggctaaggatgatgctagatgcatagggatgtgtgccccatccccatttagaattctgggaataggccaggtgcagtggctcaggcctgtaattccagtgctttgggaggctgaggtgggaggatcgctcgagcccaggagttagagacccacctgggcaacatagcaagaccctgtctctaccaaaaaaaaaaaaaaaaaaaaaaaagcgcacgcctgtagtcctagctactcaggaggctgaggcaggaggatcacttgagccaggaatttgaggctgcagtaagctatgattataccatcacactccatcctgggcaacagagtgagactttgtctttaaagaaaagaaagaaaaaaaaaagaattctgggaatatccttcatttcacagccaatgtgtgttattctaacagaataaagatagtgattgggcaaagagagaaagtcattagtcttaagtttcccacagctcctgtgtggcatgctatgaaagaaaccagaaatattccatatcctgggcagggtacagataggagctgagctagaatatggtgggcctgccaaaggcctccatagagaaggagcagattgcacagtgggaccgatggaagatacgatagaatgtttgagatgtctgcgtccccagcaagagcagaggtcaggctgagttggtgagggagagctaccagcccctgatggagacaaaatgatctctaccaataggagttccccaaagtgccatgagtggcccagaaatcgagtgacacatgaatccgcagaaatacgtttcctgggtgattgagctgtcaggggtcttgttaaggaagaagtgaagagggccaggcctttgaggtaagacggagcattaagtaaccccagaaacacagagacgatattcctcggtcatggaggacacagaaacacacatggaggctgtgcatagcacattcaaggaatataagtaaaagggaataatgagagacaacactggagcaggagatacaggaggtttgcagaaagccttcagtgtcaaacaaaagcgtgtggactttgtgctatgaacacattccccaaagggtgttctgtaaaacacttgttcattgagttagtaataagtgtccaccaaaaaagaagggcggactcatagatttaaaattttgggaaacaatgagttatatgcagtgaagcaggtatctcagcatcttcaatttgttactgtgcattctgagaatatgatgggagcatatagacttgatcagagggaaaactcaagcagcagatgctgtcacacacgttgagtggcaggatcagaggacaaagactacattgatgactgaaagaatgggaatgaaagagactgactagagagttgttaactaacaagagttgtcagggtgaggtgtctgaccctgggcaaggggggaagggatgggaacagcccaagctcatgattgcctaaccagcaggacggaaggtcccagcactgtttcctgaaatggggtattcggagggtgcgctgcttcgggatgaattttggtgtttgaatcacgaccagacatgcaggtggaaacggccagcaggcagttactgactgaagaccgaggctcaggacagaggctcaggcagagatagaggtgaggatctgtgcacttggccaggaccttaggccagcactgagtctccaggtgcgccctccgctcatggtcttgtcctgaggcacctcgctcatgcctgtgctcctcaaatgtcactggctgtgctgggtactttctatttttctcccgtttaaaaatgtccagtcccgtatcccaattcctaggacccaactttccacaaaaccagtgatttttcagctgtggtcctagggaacatcggctctctgcccaggacgagcagtgattgtccttcccttggaacgcatagtgagcaagtgatttgcatattgcatctcaattttatttttctctcactattttttcttaagcctttggcgcttgctattaccagtgtgtgagcaagtgtgaccagatggacagcgaatgagtgaataaacattaatttaaattaattaaattgattatgttcgatttgactgctttttagtggatatctaggctcatgattgtaatttcataataaaacctgttaccgcagtggtcggatttttctgggccacccgagtggagcggccgggttgggccataaagaggccgtggccggaggacggagcgggggcgttcactccgctggggcttctcatgccacgttttttctccaggtgtgacttggtcggacgcggatcccggcagccagctggggcttagtcttctgtgaaagagtaaagtgcctcctgcggagagcgggtaaactcgccaagggcctgcgaggcgggagttctccccaggccaggcgaatggggcggccctgagctggtctagagccggctccacgcgtctgagggggcccgcggggcggcggggaggtggcccagacgcgggttctgtgaagggacttggggaaggaagattccattcgagcagaggaaaagccggattcaaagaggccaggccgctgaggggaggggctgccaagatggccgtcggtctcctcagggcctcctcggcggtcagtttttcatcctttgatccaggggtcgcttcctgtacctcgtcctcagcatctggaatccagagacctatggcgtctgaggtgccttgtgcctcgggcatacccatcaagaaaataggccatcgaggtgttgattcctcaggagagacaacctatagaaagacgacctcatcagccttgaaatgtgccatccagttgtgcattactcacactgtggggagcctggatcccacaccagagcgtcatgtcctcatgtaagatttctgcgtggtggagaatatcttctttcccagtggagggagcaacctgacccctgctcatcactgcagtgagtttcctttcaagacctatacacctgttgccttctgctactttcaggagctatttggtatctgccctgatgatgacttgtactccctctgcagtgagccactgattgaactcagtagctctggagctgatggttccctgttacatgtgtccatccacratgaattcattattaaaacagtccaacataaacaggcggagtttctgcagaagctgattccaggataccacatcgacctcaaccagaactcttggactttgctgcctaaattctatggactgtgctgtgtgaaggcaggtggcaagaacacgcagattgcggtgatgaagaatctcttactaagactggtcaaaatgcataccaaatatgacttcaaaagttcaacctacaaagagcaggcttcccagaaagagcaagagaagcctcttcccacattttcccacatttaaaaacctagacttcttacaagacatcccgatggtcttttttttggatgctaacatgtacaacgctctctgtaagaccctgcagcgtggctgtttggtgctgcagatctttgagataatggactatagcctcttgatgtcaatccacaacatagatcatgcacgagagcccttgagcagccaaacacaatgctcagttcacacttgaagaccagccccccaaagggctctgtattccacagccatggaatccayccagggagaggcttgacggggcagccccatggagactgatgaccatatgggtggcatccctgcccagaatagtgagggggaaagaatcctgctttgtattggcatcactgacattctacagtcttacaggtttgttaagaagctggagcattcttggaaagccctggtatgtgatggggacactgtctcagtgcatcgcccaggcttctacactgaacggttccagtgcttcatgtgcaacacagcatttaagaagatcccggccaggtgccgtggctcgcacctgtaatcccaggactttgggaggccaaggyggatggatcacctgaggtcaggagttcaagaccagcttggccaacatggtgaaaccccatctctactaaaatcacagaaattagccgggcggtagtggcacatgcctgtaacctcagctacttggtaggccaaggcaggagaatcacttgagcctaggaggcagaggttgcagtgagccaagattgcaccactgcactccagcctgggcaaaagagtgagaccctgtctcaaaaaaagaagaagatccccttgaagccttctccttccaaaaagtttcggtctggctcatctttctctgggcgagcaggctccagtgacaactcctgtgttaccagccatcggtctcaggggaacacaaggcacaaaccacaacaaaggcggaagtggagccaggtgttcaccttggttgtcctgatgttttacctcagactccacctttggaggaaatcagtgagggtttacctattcctgaccccagtttctcacctgtagttggagagaccttgcaaatgctaaccacaagtacaaccttggaaaagcttgacattgcagagtaagagttcacccattgagcacaaagcctcagaagacctgaaacaagattctgccatctctgtgatcccaagatgtcagcccttgccccagcaatgctgagttttcttctactttcccattaaaaaggaatgtaatggaagcgaggggagctctccatcttcttcctgaagaagaacctagtctctttccccttcctcatgaatgggcattagtgcctcagacagttgaggactgcagcaacccctccactccagaattgggtggatggattttcaatgggctaaccttggctttcacaattgagctttttcagacccccattcttcatgctgggaatgggatggctggacttggcagttttctttcccctcatctttcaccaggagctggactcataatttcctcaggacagactagctggcacattatacccacctcagttctttctctctgatccctggaagaagatccctgtaatctctgtaaaggttttgaggggataagggtgtttaaccacctcccaactttcttctttttattctgaataaaggaaaaatgcgcacagcacgcaatttcaagccagtttcagatcaaaaccccaaaagtgttgacgagatgcctagtcataggattccctcagaagaaccatggtgtttgtgaagagaagtgtggtgattgctctgccaggacagctcctctttaaactcctcctttcttgatgaatttgttaaggctggaggaatggagagagtgggacatggggtaatctttacccctttttttaaaacatggggcagccgtgggctgggagatcatagcccttcctaggcagaatcctactcactgccagggtgtaatgattattactgttttgcaatttgaaatatattcggttgtttttgtaaatatgaagacctatcaaatgaattttagatcattctccagaggagatttcttttctcttcccatcttttccaacagtgctctcctgcttgtggagctaaggtagagacacctctgtctgtttaacaggcagtccatatctatgaggctagcaaatattttcttttcttttctttttgaaacagtctcacactgtcgcctgggctagagtgcagtggcgcgatcttggctcactgcaacctccacctcctgggttcaagcgattctcctgcctcagcctcccaagtagctgggattacaggtgcctgccaccatggccagctaattttttgtgtttttagtagagatggggtttcactatgttagccaggctggtctcaactcctgacctcgtgatccgcccacctcggccgcccaaagtgctggggttacaggcgtgagccaccgcgcccggccacagatattttcttaaactcatgaggagagagcagattcttgcctcagtgaagtcattgctgtgccatgtgtcctacccgctgtcttcatgcagggaggttggaaatgggggccgcatgtgccctctcctcccatctacaagagttgtggtttcccatctgatccttccactcttgttaggggaggaagggggcctggtatctcaggcagattgttgaattcctgttctatcccttctccttccctaccttgatagtaggttagcccataccccaaataactgtctatattagacaccctcagccagtttctggctgcctgtctgttgccatgttcttttttacaagaaggaaagaaacaattattgctattttttcataatttactatttatgaagtatttaagtgttttattatggatagagttctgtaatgggtgggagggaatatttgagggagggctgggtcttaaggaaaggaatggggaatcaacattattatgaagtgtctctatttgcctctactttgtattgttcagaaatggccaatgcaatataaaagtgttacatggttttaatgtattaaactttaatcagttttttagaaaaaaataaaattaaaaattaaaaaactgtttatatttatgattataacataattttaatgaaaaattacatcaataaatatagtattccacaaatgaccccagaattgcagttgcttcagcatgtgaaaatatttaagaaactctctcagggtcacgacactgaaatgaaatgggtttcattcattaagcaatgtgctgagtgcccactctgtgccatgtggtggagaagagaacccagttggaggcaatgacgcactccccctcccacacctgtcctgcggaggtggctgcccccgggacactgagccctgcacatttctcagctgcctttcacctcgcctccaacatgtgcaccggttcttgggaatggactactgcagagtggtctgtgcttctcccaggcctgcgccatgaaaacctccatgcagggggctccacattccatcctaaaggctgcatgtggtttcctgggtgacgctggaaaccgggagctgaagatagaggaatccatgtcagtctgggttcctggactgatgaacggcatggaaaagactccactcttctgatgaccaggaacacactcaactatctgtgaattgagttaaaaataaagtttcattgtgttaagcttcctgcatttgggggtatttgttacattatgtggcattgccctaactaatacatactaggcattttggatctaaagattaacaaaccacagatctgtactcaaagaacaaggcctagtgaggagagcagctacataatcaggcaggtttcacaacatatcaagagcagtgaaaggacatgcagaggacagtatcagatgactggagaggggcccctgatcaacccagaagctgcaggcccaggaggagtcagggaagacttcttggaggagactgaaggagtgagagggaattggcaaggctaaggagcgagaaggtggcccagtgtccgaggaactaggacggcatgaatgagtcacacctggcatgaggggtgggggtgctgctgtgccaccagagcttagaacaggagcttctggcagtgcagaggctcccacactcctctagcgacttggactctggggaatctggatgtgttttcaggaaggcagactaaggttagatttgcagatttttgtttttcaactatttacttttatatataaagagaacatgcatctgtttcttctgtctccactcttaaaagattaactgctgtggtaatgccctcctgccatcaagagctagaaaactgaacaaaatgtatggagtgagtggtgtgctgaactgaaacacctacgagaggctagcaagggcagcgacctgagatcccccctacccagaggcagccttccagactcagtgcagagacggcggctctcacagagcccagtgtctcactgaactctggaaacacaaatcagatgtgggaggctgaggcggccagaattggtggtccagaaaggagtgagctgcacagagagagaagagagcacctcaggtacctagagtggagaacacttgaatatttggttgaatgctgagattttcatgagtggggtaagactccagaaccactgcaaagtgaagctaaccccaaggacctcagggcgcagggaagagccattgcagctgggggaaaaatggggggaaagagaccgtggaggacaggaaagcaagcagggtcctgacccctacagatcccctgaggctgggagacaggcgggaacctgactcacatgcagctccaagggttcgtttgccatgggcaggattactgaaagagcctcaggcctgcctgagcctgaggctaagtgaggagggagggcagagcggacagcccagctatagccaccaggccacccagtgctggatcaaaagcaacctccgactaccactgaggggagggagtgcacagatccgggcctgagggtcaggctcagagggaaagccctccggcaaccagttgccacactaagcccaaggaagcactagcaagactgaagtccatcaggcctgagggccgcatagcaacaacaacagaaacaaaactgaaaacaaatccgtttcaactaagaccccgatgcatccaagccccacacagaggcctcacaagaggcccgtctgtccaaaggcataaacaccacatgccttagcttctgcgtcccacacatatggtccaggttttcaacaaaaagtacgagatgagaaaagcaagaaaatatgacaggaaacaaagcacagaattagatccagatacgacccaggtgttctactattgggtaagaatttctaaaaatagtgttagtacatttaaagcactaggaaaagtgtgaattttaaacagagatggaaaatatagtaaagaatcggaaagaaaagatagaaatttaaaacagtaacacagatgaagtgtcatcagatggctcattagcagacctcacacagcctctgcaccccaccccccaaaaaagtcaagtcacactgaaagacacggcctatgaagaatggaaacagaatactgtggcacaacaccaacaggctgaaatacttgagatttgagtcctagaagaagagagagtgaacagggcataggaagtgtttgaagggataatggatgagaatttttcaaaaataatgaaataaacaacagctctgagaaacttgtagagcactgatagggataatcacaaaacaaaacagtaaaattgagaccaaaatggaaatgaaaaayggagtaaataaagggcaaaacaaatagaaaacattgagtcagatgacagattttaacccaaccatatcaataatttcattaaaaggaaacggccgaaacaaaccaattaaaagacaaagatgtttagattagacaaaaaagcaaggctcaactacgtgctgtttataagaaacccactttaaatatagagagatagatatgtatattataagtaaaaggatagcaaaaatatgtcatgcacacactaaccaaaagaaaactacagtttctgtactaatatgaatagatttcaaacagatacaaagggagaaattatagtaatcagagtgttaattcaacaagaagatataacattttaaatgtatgtacttaacaacaaaccttcaaaatacataaacaygaacaaaaactgatagacttgaaggagaaaacagtcacatgaaaaattctagacggagactaaaggttttttctcagtaatcaatagaacaaataaacagaaaataaatcaggatgcagaagacctgaacaacacaatcaacaaagctggccccactgacatttacagaactctgtccaagaatatcagagtacatattcttctcaagagcacatacaacattcccaagagagacaaaaacaaactgttacaactttttaaaaattgaactcatacaacgtatgtttcctgaaacagaaatatttctggaaaattctcaaatgtttggaagttaaatgattcataaaatgacccatgggtcaaataagaagcagaagaaaaatctgagctgaatgttaaggaaaacatatccaaaatcatgggatgcagctgaaataatgcttagagggaaacaaaggtcattaaatgcctatttagaacagaagaaaggtcttaaatcaataaaccaacatttctatataacaaactagaaaaggagactatattaaaagagcagaaggaaagaaattataaatataaacagaaaacaatagagaaaaatcaataaaagcaaatgctgatccattaaaagattaataaaagtgaaaaacttctagccacactgatagagggggagagaaaggaggagagagggagagagagagacagaaagagagagaaggggagagagagaaagagagagaaggggagagagagagaaagagagagaaggggagagagagagaaagagaagggagagagaagggagacaaagaggaggaaaatgactcaatgacacaaattatcagtattggaagaggggtcctcaaccacactaccaaagacctctacag

SEQ ID NO: 93503 - DNA, 14315 bp, Homo sapiens
  misc_feature (1)...(14315): n = A,T,C or G
atacccaaagagttgccttttcagaccaccttttatgagctctaagaatgtaacaagaaaaggatctgactttatgaacctatctaggtggagttgtaagtcaatgccaagtggttgtatgtgaaaatctttagaytgcagttagattttcggttgagtgaaaatgtttccctggggatttcaattcaaagaattattattctayttatacattatctatgtgtctgtctatttcccttgagagytcgtatgtgcatgttatctctctatcacctttagcgcctagctttccatagaaaaggtcattcattcatatttatcaaacatataattatttagaagcctaccatttttagacttgtttgggagatagacatgtatgtaaacaagtaattcaagtaacctcttgcaagagatgtaaaagttgttataggagcccaaaggaggaggtaattaactctcccagggaggttggagaagaggtaatattggagatgtatcaggagggacagtggggagttggcatagaggaaaagggcaaggcctttcctgacagagggcatggatataggcaaggaggacacagtgatgctctttagaggggctggggaacacagagattacctaaatgtgtacagctgtgaggatgctttaccatgataggtctgtgtaaaagcaaaggctrttttgcttttgatgcgcaatatctttcattctgtatgctggctcctcctcaaagatgttgttcacatccctgcctttgttttcatggttccttctgcctaaatacctcttactcatcctttggggcctagctcttctgtgaaactttttaacactttcttagcagaatttattgctccctcttctatgttcccatagcactgtgctcacattgctatgcaagtatcatatgggtattgttcatgttgacgttttccttactggactgtgaggtcttcaagtgctgatactatatattgttttctttttgtattcttattagcataatgactggcaaacaatatgtatttaaaacatgaagaatcagtacggatgacccccttaatgttccagacagaattatttttaaaagagaagtagcttggctcattgggaagaggcctgtatgaggatactagaaactgaaatctaacttcactttgcttcttggtgctaaccagctgtatggcaacaggcttgccccttaacctgcggctgcatcttcgctcatatggatagagcagtagcttatcagcataaacccaggagatggagtgaaatgatcttctgtgattccttctgactctaacagctggaatttaaaatgtatctgatgaattgattttatatttactcatattttcttcattttcctttgaagtgtcaggagactttattatttatctgcttaactgttctcataaataacacatggaggttttttattactagrtattagtgaaggaaactaaaatcctgagtttgtgctcagaatagtcatagagtcagaatggatacttggagcatcttgagaatatcttgctgtctctagacagttctcaaactattctccaactgactttgtgcaaaagtaattgtatgttgttttctctaaactggtatattaacatactatctccaaaaattttctttttgagttgaatttctaatgaattgattagcagcagatggtcagaatctaggaaaataataataaattattttgtcagtattcacagtgaacatcctttgagatactgaaggaaaaaggaaataactcagaaattatttttcatctgtttgttgtaatcaggaaaacatggccaactaagtatatcaggtaaaaacatgattttataaactattatgtgattcatcaatgaagtattaaaacaaagcaaacatttataatattgttccaataagcacataaataacttcagctgttctgataactgagaagattatgaatctattcttgaaaattattaatttttattaagtgatattgtgaactgagccctgtagtaattaacacaaacacaacctgtggctcttgggcattaaggggcttttcagagctttgtctgaaaatggtggtctgcagtgagaatagcagttgagagcacgcagagggctgactgggtaggatagggctgcagaaacagccctcagcttctgtgtgttcgaaggtaatggcagcttaacctgagaaatgaatggtgtcttgttatgagagagacctatttttttcctctatgtcccagaagagaatagytacgtcacagatattagtcttccttgtctttaggggagtatttagaggctttgttttgatgttgcagtgtcctgtagggaggaagaggctaggctcctttaccagcttgccagcttgctaacctgtttagaagggaaggtggggtatagatactaacctctcaagacccaggccagagtctagctagatttaacaccttcagctggatacaatgaccacctggaccaggtaatcttttcacatgcataatttaaagtattatttcaatagttttttgattataaaagtaaaacattactattgcaggaaacttgaaaagtataaaatagaaagttcaaacaagaaaattagaaacaccccaaatcctaccactcagaaatacccactgtcaatattctacacacttcaacataattgagatcctagtttgtatacaattgtttgttgccgaacattacgtcataagcacttgttaaacctttgaaaatacttcttaagcattatttttaatagcaggtttacacagaagaagattcttagtttatataacatatcctctattgttgatatttagattgtttcaaaatttttctgcttctatattctgttcaaagaatgactttcttcataaagtttctttactctttagatattttggtaggatgattttctagcaatagatttatgtcaaaagatatggatgttttttagactcccagtatgtactatctttatagaactattatgttgctgtatcctctgtttaatttttgtgtttcctcttacgcttttccgatagggtgcaagattttctgacactgagaatgactatgtccaccaacgctaggccaaccactctagtgccaatcaactgattaatgacggtcctttgactttgacttagaccctgtgagagattttataagaagtgaaacatatggttgtgttgtagaagtttataatccagcaaaagtaatgcatgtggaaaaattcacaaacaattcaagatagaatctctgtaacccttctttgtaggacacatgtgcaataggaatctgaggtctctacaatgtatattcccaatgattattgtgatcaatcctggggcaccatctattctaggtttcagggagcaatttcttattctctcttttcaatgaaggtgtctcgacataccaaccgttcatatcatgttcatagcgtgatcttgaacacaaaaccacacagcctctcattctggaagggcaagaagctgagcctctgctaggaagtgtttctctgtcagactctccagctagagtctagctgctctttgcagaggcagctccaggcgaaggactttcttgttgtttgtagccacaagtccgacaactactttccatggtgtctctcttcaggggtgttactattcagcattgctcttgcatatcctcccatcagagtagttcaatagactctttggtgtctgctgaagtctggctttctgggctccctctcaaaaacggcatatttagccttactcttggcatcacctctgcagggcgtcggacagcactgcacccatggctttgcataagttctcaacccttcagaggaatgaaggaagctgcaattgcccccaattcataagccaagggtctaggcactgccttcttgttgaatgctgaccaacattcaaatttaagtattcttgcctatctgataagcaaaaatgttcctgatgttttaacttggaagaaattatttcaatatcatgatttccataatttctatcatttggtgttcttataaaagctatctctcatcttattctggagatctttccttcacataggaacctctacatgacacagaaaagaaaagatagatgggcggcgagagtctagatttatattctagctgttatgcatggtgaggccagcttaagaaacacatggcttttgaaagactttccattgtataaggagcagaccagacttttaaccacaatccagagacttttaacttcacaaagatatggcattttattttaataaagctatcgagagagctcccttttcgagtgacttttcaaacgcatcttttgtcagcagagggcttttattagctaatgtaacctttctgtactccatgttagcagagagagaaaggaaatgtccttgggttccaaatgtggaaagttgtgcagagactctcaaggagaaagaagttttccgctttccaaagctgcatttgtcactcgctgttgtatcgtaactgaaagtaatgaactttccgatgctactgtccagaaggtaaaggtttacaagattatgcctctaaactggcaattgcataaaaagagatcaccaaggattaaaatgtagagaccaagtaaaagtgtgaatttagctgtgagtgataacttgtagagactcagctataaaatacctgaaatggggggagttaggcaagacctrggagtgaggagtgagagtaacagtcttggctgtggaacagggtagctagatgtttagggcttaatccgagccactactgataattaaacagcatcgataaactgaaggagcatggggaaggagtatggattgtgggctccgggtgcaattcatgtggggtgtcggtgttgtggttccattaatcagtcgtttgatggaagagctcagtcagtagtggaagaggctggtggcaggggctttgacaggtcttaggacactgggaaaatagattgagattctagagcagggctagtgcagtgtgggatctgaacgtgttgtcaggactgagcccagccctttgattacagtcaacatagtaggaatggagaaagtcacacctaaatgggaacctgaaccagggcttcatttcaaagcccatggaacagatagggaagggtgactaatgacttttctactgttgcagactggcttacaaactgagtaaggcacaaaaggaagaactggtgttgatagcaaagtgtcatcagagaaggcaggaaggacaccctgtcatactgcccrttggctccccagatatcactatttttttttcctcatccttgttaggaactggcaggtagttgtgcttgatgtctattagacttcatttcaattttgaggtccataattcaatggggatagatataaaaaggcttcctttttcattaaaagggtaattacctcgttatcagagtgctggaaagatgagagctyatggatttttcataaaattataagtttataaggagtcrggtgaagtcatcttattctgtcctcaagccagggacaaatctaattcacccttgatggatgggacattgtttaacaaggatctctagagaataagcgttgataactttcagtattttgcaaccttcagttgtgttatttcttctatcctgttgaatatattgacacagaatggaagtccataatttttttgttctctttgggtagaaagaatagtgttataaatgtacttcattttcattatgttaaagaatacttatcaaatgccttgtatgtgcttggtgccagatacagctgtgacacagggaagaagacagacttgatccctgctgtcatttagctgtgagactcatgagggataataaccaataatcacatcagtaaatgactacaaattgtaataagtgctgtgaaggaaacactaaggcattgctacagaggataacaggaggaagctaagacctcactgagcctgtggctccggccgctgagtgatggtcccttctgtctgccagggtgggatcgggcactcatccagttgcaggtgcgagcactattgagtagcacagggtctcaagctgtggccatggacttgggcaacaggaaattagaaatatcctctggaaagctggccagatttgcaaatggctctgctgtaatacagtcaggtgayactgcggtaatggcsacagccgtcagtaaaacaaaaccttccccttcccagtttatgcctttggtggttgactacrgacaaaaggctgctgcagtaggtagaattcccacaaaccctctgagaagagagattagtacttctgataaagaaattcttacacgttgaatagtagattgttcagttagacctatctttccagctggctacttctgtgatatacaggttctgtgtaatctgttagcagtagatggtattaatgaacttgatgtcctagcaattaatggcaacctctgtagccctctcattatcagataytctttggaatggacctgttgggacagtatgaataggaatgactgatggagaatgtgttgttaacccaacaagaaaagaaatgtcttctagtactttaaatgtagtggttgctggagcacctaaaagtcagactgtcatgttggaagcctctgcagrgaacattttacagcaggacttttgccacgctatcaaagtgggagtgaaatatacccagcaaataattcagggcatccagcagctggtaaaagaaattggtgttaccaagaggacacctcagaagttatttaccccttcacaagagattgtgaaacrtgctcataaactcactatggagagactctatgcagtttttacagattatgaacatgataaaatttccagagatgaagctgttaacaaaataagattagatacagaggaacaactaaaagaaatatttccagaggtcgatctatatgagataatagaatccttcaatrctgttgcaaagraagtttttagaagtattattttgaatgaatacaaaagatgcgatggtcgggatttgactttacttcggaatataagttgtgaggtagatatgtttaaaacccttcatggatcagaattatttcaaagaggacaaacacagctgctttgtgctgttacatttgattcattagaatccagtattaagttggatcgagttataacaactataaatgggataaaagataaaaatttcatgctgcactatgagtttcctccttatgcaactaatgaaattgtcaaagtcaccrgtataaatagaagagaacttgggcctgrtgctcttgctgagaaagctttgtatcctgttattcccaaagattttccttttgccataagagttacatctgaagtcctagagtcaaatgggtcatcttctatggcatctgcatgtggtggaagtttagcattaatggattcagggcttccaatttaatctgctgtcacaggtgtagcaatgggattggccaccaaaaccgatcttgagaasggtgaaatagaagattatcatttgctaacagatattctgggaattgaagcttacaatggtgacatggacttcaaaatagctggcactaataaaggaataactgcattacaggcagatattaaattacctggaataacaatgaaaattgtaatggaggctattcaacaagcttcagtggcaaaaaggagattttacagatcatgaacaaagctatttcaaaacctcaagcatctagaaaagaaaatggacctgttgtagaaactgttcaggttccattatcaaaatgagaaaaatttgttggaccaggtggatataacttaaaaaacttcaggctgaaacagttgtaactattagtcaggtggatgaagaaacgttttctrtatttgcaccaacacccggtgctatgcatgaggcaagagacttcattgctgaaatccgcaaggatgatcaggagcagcaattagaatttggagcagtgtgtactgccacaataactgaaagcagagatactggtgtaatggtaaaattatatccaaatatgattttggtactgctttataacacacaacttgatcaangaaatattaaacatcctactgccctaggattagaagttggccaagaaattcaggtgaaatactttggatgtgacccagctgatggaagaatgaggctttctcataaagtgcttcagtcttcagctacaactgttgtcagaactttgaatgacagaagtagtnttgtactgggagaacctatttcacagtcatcatctaataattctcagtgatctttttaaagagaattctagaattctatgttttctagggtaatgtgctatagagcaaaattttagtagtatcttccgttgtgtagctgtgtatacagtataaatatattctaattatttgtattaaaatgctcatttacatgtgccaatttttaaattcaagagtaacccatattcgcttaatcttatttacattataaatcaagaaatattattaaaagtaagtcatccatacatcttagaaaagattacatacttttttttctataattctgaaatatatgaaaaacttagatatatgtcatatatgttattataacagatctcttcctatatctcatttgtcttctttatatacagtagtgacaatttaccctcagtcatcctatagctcacctctttgcccaacaactttacttgcctacgactgttcacaaactggaacaggccatattcaaagccagtgcctatttcttcagaatggttactagacatagtaagttgagggagctaatctgatacacttttaataatacgatgccttccaagttggttacaaaatcatgaacatagtggaataaatataaatgagattctaactaggatgaggtagtaattatgtatatttttcaaatttacctaaacataggaaaattatttacttgtctaattgaactaggtcactttttgaatatgtatattgctctaatgtatggaagttcttagtataagagctggaggaatcatcactttcagttaatagatgtttgaaatagatgtttagaggttactgatatacatgtcaacttgttcattcccatcatttaaaatatcaccttataattccacacaaaagtaaatggtatgtggacgtcataatttagaatatgttatctttttaaaaatcttataaaaatacaccggactcagtggcacatgcctgtagtcccagctacttgggaggctgaggtcggaagatcacttgaacccagaagttcaacactgtagtgtgcaatgatcatgcctgtgaatagctacttcactccagcctggacaacatagcaggactctatctctaaaaacagttttaaatctcataaaaaataagtaaatctggccgggcatgctgacttgtgcctgtaatcccaacactttgggagggtgaggcgggtggatcacctgaggtcaggagttcgagaccagcctggccaacatggcaaaaccctgtctctactaaaaatacaaaaattagctgggtgtggtggcaggtgcctgtaatcccagctacttgagaggctgaggcaggagaatctcttgaacctgggagttggaggttgcagtgagctgagatcrcgycactgctctccagcatgggcaaagagagtgaaactatctcaaaaaaaaaaaaaaaaaaagtaggtaaatttatgactcagggctaactagttcataaaatattaaaagtttagctggttaaaccaaagattttaaagatatgtatatttatatcaaacattgatcatgtatctattgtgtgtaaaacagcatgttaggcaatgttgatatactttctgaaatattaaagattaattgaaattgaaagattaaattaaaaaaaatatgtcattgagatgagtgatcaggaaaggcctcttttttagaagtgacatataacatgagcccggaattataaaaggaaccagcctttcacaatgaaaagagcactcctgacagtgggagcagcatgtacaaaggtcctgcactagaaaaagcgtggtatgttttgagaatttagagagttcagtataccaggagcagaggggtcaaggaagaaggtggcacgccatgagattagagaagtaagcggacaaataatgcctgatcttataggcaatggtgaggggtttggattttattgtaaacggaatgtctttaaaagatcactctggctactgtgtggcaaatgaactggaagtggaaaaatcagaacagagagagaggttaggaggcagtccaggaacaagatgttggtggcttggactaaggtggggtcagagaaagtggatagatgttttcgagatacacttaggaggtcttactgatggttggctgtagggaaagagtaaagaaaagataccaattcaaggctgacactggtaagatgatagttccatctagtagatagagaacaagcagggaggaacaagtctgtagtgggaaggatggggggtagatgtttacatttgcacatgttaagtttgagcggcctgggagacccagaaatagaactgttgattctaagtctggagttcagagatgtcagaactggagaaatacgtttggatgactaagtctgtcaatgagaataaaagcttgggaaaagaatgagataaggaagaggaggagagagaaagaaagaggcccagttgtgaactttgagaaactcttaacatccccccacagccttgagaacaattggcagagtagagagagcaccagactcaaaagggtgtgggttctaatcccgttttagttttagacactgaccttgagcaagtaactgcttcttcctgaactcaggatctacactttaaggtaaaaattattctctaattctcttccatcaccaatattctgtaattctcttggtattaggctcattttccaattactttgaacatattcgtaactctctttacctaccttaaactgtcatatccagaatacccttttctaatcatgatttgaattttaggtgcattaagttaacattcctctaaatctttctcttctgccaaattgtgattttttttgtgggggtggaggggcagttgtgcttgtgcttgttggcttgtgcattccaatccaatttgggcacaatgaggcatctgtggcccaatggagattggtattggtaggcttccttgttcrttaaaaatgaacttctttatttttgccatttctgttgagctcaatttcccagtctcttttaaatcagctttagagatwtgaggattgccagtggggtgtgttatttgacctcacttaatatttgtgtttggttcagatcataaagcaaaccaaattgactgcctctgctcagtacccaatwggacttataaccaggcaaaatgtgggttgaaagatgtattcccaattgcaatgcagtggaagtgtttgtattaaacaaagtttcagagaactgcttaaggatctcagggtggtatgtgttctagatatttttttcttaacaaattaacactgtcaaattattcaggttgaaataattttttaacaaagtgcctttgctgtcctgtcacagtgctttattgctaatttttctcatgagatgattctccctgttgcttttgcctttgtctcacaatgtaccatctgaaactgctaagaaagttggaaaaattaaaaaaaaaaagacttcakgctaaaaaaaaccccacacatttcagtggttagtgaaaaatgatagctaagatagcaattagatgtcctttccttttgacctaataaagactctgaaactggcattgggtcatctcagcaaacagaattattatagtgatgactttcctcctattatgggtaagggcttgttagtaatttatctttactacgtgtccccgttttcaggattcaagcctctagtcatgactgatatggttattagagacaaaagaggttagagtaactgaaagcaataattccttgttgcatcttggattatttggccaaattaacaatggtgttaaatgcgtgatgcacttaatgaatgtagtgaggtgtgagccagtaccatgattgtgcccaggtaaaatataacattatcaacctgcttttgcattttttttttccttcacggtcctagatggaaaccctttcaaattctccaaaatagattcagctgggggaaacttcaatgtctgcttttatatgagataaatattcccaaattgttactttgactatattatttacctttccccttttctatcttttgagagttgaattgtgccccttcccaaaaagaatatatccagtcctaatccccagtacctgtgaatgtacccctatttggagaaaaggtatgtgcggatataattcagtgaaggatctctagataaaatcatcgtgagtttactgggtgaaccctaaatccaatgacaagtatccttataagaggaggagaagacataaacaaacagaggataggataaggccatgtgaaaagaaggcagaaattggagtgatttgtctgcaagtgaactaacatcaagaatttcaaacaatcaccaaaagctaggagagagttatagaatggattctccttcagaaccttcagaaggaactagccctaccaacactttggttttggatttctggtctgtagaaatgggaaagaataaattaatttctttctttctctctctctctctctctctcacactctcattttctctcactccgtcacccaagctggagtgcagtggtgtgatcttggctcactgcaacttccacctcctgggttcaagtgattctcctgcctcagcctctcaaatagctgggaatataggcaagtgccaatctttctttctccctccctccctctttccttctttctttccttctttccttccttccttccttccttccttccttccttccttccttccttccttccttccttccttccttccttcgtctcactctgtcacccaagctggagtgcagtggtgagatcttggctcacagcaacttccacctcctgggttcaagtgattctcctgcctcagcctctcaaatagctgggaatataggcaagtgccatcacacctggtttatttttatatttttagtagagacagggttttaccatgttggccaggctggcatcgaacttctgacctcaagtgatctgcctgccttggcctcccaacatgctgggattacaggcatgatccactgctcccggccaggaagaataaatttctattgtgttaagtttcctagtttgtaataatttgttacaacagccctaggaaactaatacgctacactctaccaatcattctgtaagaggcagcacgctggagtgagaaagacattggacttcgaaaacagcttctgagcttaatgcttctaccagtagctgtgtgaccttgagtgtactgcaactccaccctgagtctctgttgcttcatctacaaaagggaaggatgtggacttccttttcaagttctttctagctctgtccttgctctcccaccataaagaaacccagaaaattgaacaaaatttaaaataatgatttttggttgttggacaaccggtattgtaggactgtggctcctgagagaaggacaacagacaagataatttctaagctcactccaagtttagcctgaaggtactttctggactatgccacagagaaatgaaacataatcaaagcccagcaggacttttgagttgaagggataaaattggaatttgtggagaacaaagttactgacatttgtggtacagagcactaggaggaaagaattatgtataaaaaatagttccagaaatatgcataggattcttcttgaatttttgctgaatgctaagatgttcatgcaaatggtgacgcttcacgaggttgggcaatggaagtgactggataactgtgagctaaacctttcccagatctcacacagggctgggagatgtttcagttcccaccacattgggagactgcactgaacacctcgtgcattcattagagatacccaaaagggtaatgtctcagtaggaggactaaattagctctaaggtaaaggctacatttgacttatcttaacagatcataaacataagcctttaaaatctcatttgcaagaaatgtttactgcttgccaaaataaccttcaacagtctttagaagaagacagaaaaatccagatattcagcaacgtaatgttcatagtgttttt

SEQ ID NO: 93504 - DNA, 14042 bp, Homo sapiens
actgctttttaaagcaggcccctgattccattcctcctcactaggttggacctcccaaccagggtcttcagtcacctaccccaggtgcattcaggccggcatcaggttcataactccctggggtgaaaatcccagagggagagtcagactgccatctttgctgttttgcagacttcgctggtgatacctttgggtactggaaaacctgaggtaactagggactggagtggacccctaagtgtaccccagcagccttacggaaaagtggccagactgttagatggatgtccattcccatatctcctcactgggaaggtactctaggtctggacctccagccaccaaccaccagagctattgagtcagtagtaattcggcaactccctggacagagcttccaggggcaactgaaaacctctctgtcactgagtctgccacagtccttgttccccttggactaatgaaggaacaaagaccctaagtgtcttatccacacctccaacaagttgcaatcaacccaaaaaaagaccagtccttctcccacgggtcccacacaaccccactgctcctcaccagacagggaacccctggtttgagcccatagcacaggccttccattctagggtgattgcactatctgattgctgacctgcatctctctgggttggagcctccaggagacaagcaaaagaccctttggcacaaccactactgaggtcccttcctctgctacctccaagctgtggaaggaacgtaaccactgagattgtaccagagctgcagtgggcagcctaggagtgccaagttgcaatctatagccagcactcaagggggagaggaatccacactttcagagcattgagagagaacatggctgaaactgtgaggaaccatagaagagccacaggaccgagcaagaatctaccaactgaccaataagcctaagtgccacatgttgaatcacaccccaaagcttcaacaccaaaagtccctcattaacataaccccctctgaaaccagagacaagaagtcagcttcaaacaaagaccctacacaaagactccatctggtgaagacatccagaaaagaagtctcttgactgtactcaatgtaaactgcagttaaatgaacatccacatgcagagatgagaaagaaccaaagcaagaaccctggtaactcaaatggccagaatgtcatatgtcctccaaacaaccacaccagttcttcaaaaagagttcttaaccaggctgaactggctggaatgacaaaaatagaattcagaatatggataggaacaaagattattgagattcagggggatagcaaaacccaatccaaggaaaataaaaatcacaacaaagccatacaggagctgaaggatgaagtatccagtataaaaaagaaactaatgggtcggaccgagctgaatgacacaatacaagaatttcacgatgcaaccacaggtattaacagcagaataaaccaagctgaggaaagaatctcagaactagaagactgattctctgaaataagacagtcagacaacaataaagagaaaagaaaaagaaggaatgaacaaaacctctgagaagtatggtattatgtaaagaggtcacatctatgaatcactggcatccctgaaaggaagcaggagaaagcaaaaaacttggaaaacacaatttaggatatcatccatgaaaacttccccaaccttgctaaagattaaattcaggaaatacagagaactcctgaaagattctacacaagaagattatccctaaggcataaaatcacagtattttccaaagttgaattgaaagaaagaaagaaagaatgttaaagacagagggaaaaggcaggtcacttaaaaagggaaccccattaggttaaccctggacctctcagttgaaaccctaaaagccagaagagattgagggcttatattcaacaatcataaagaaaaaaatcttcaatcaagaattttttatccagccaaactaagcttcctaagtgaaggagaaataagatcctcttcagataagcaaatgtgagagaaatgtgagttccctcctcctatcacctactcctatcttcctggccaatgtcagaatagaatgaatgtaagtaaaattcatggtgtatctggattctttttggagttgtagcaaattcagccaaagttagccaaatcttttacaaattgttgtgcaacaaatatcccatatcaactgatggaaacttggctgtcagaaagccaagacctgccttacaagagatcttgaaaggagcactaaatatagaaagaaaagacagctaccagctaacacaaaaacacacttaaatacacagaccagtgtcactatatagcaaccacacaaacaagccaacatagtaaccagctaactgcacaatgacaggatcaaattcacacatatcaatactaaccttgaatgtaaatgggctacatgccccacttaaaaagcacagagtggtaaggtggataaagaagcaagacccaatggtatgctgtcttcaagagatccatctcacatgtaaggatatgcataggctcaagataaaaggatggaggaaaatctaccaagcaaatggagaacaggaaaaagcagagttgcaatcttcatttcggacaaaacagatttcaaactaataaagactgaaaaagacaaagaagggcattacacaatggtaaagtgttcaattcaacaagaagacctaactgtcctaaatataatatatgtacccaacacaggagcacccagattcataaagcaagttgttagagacctataaagagagatagattctcacacaatattaatgggagacttcagcactccactgacagtattagactgatcatcaagacagaaaattaacaaagatatttaggacctgaactcaacattggaccaaatggatctgatagacctttacagagctttctaccccaaaacagcagaatacacattcttcttatcactacatggcacatactctaaaatcaaccacacaattggaataaaacaatgctcaacaaatgcaaaagaacaacaattataccaaacacactcttggaccacagcacaataaaaatagaagtaaagactaagaaacatcactcaaaaccatgcaattctatggaaattcaacaacattctcctaatgactttttgggtaaatatgaagttaaaaggcagaaatcaagaaattctttgaaaataattagaacaaagatacaacttaccagaatctctgggacacagctatggcagtgttaagagggacatttatagcactaaatgcccacatcaaaaagttaggaagatctaaaactaataacctaacatcacaactgaaagaattagagaagcaaggacaaataaaccccaaagctagcagaagacaaaacatacataaatcagagctgaactgaaggaaaatgagacattaaaaatcattaaaaagatccaggaatgcaggggttggttttttgaaaaaacaaataagataggctgctagttagattaataaagaagaagagagaagatccaattaaatacaattagaaataatgaagggaatgttaccactgaccccatagaaataaaaacaaccatcagaaaatactatgaacacctctatgcacacaaactagaaaacctagattctaccagatgttaaaataagagctggtaccattcctatagaaactattccaaaaaaattgagaaaaagggactccttccaactaattctatgaggccagcatcatcttgatatcaaaacctggcagagacacaacaacaaaaaaaataaaacttcaggccaatatccttaatgaacattgatgcaaaaatcctcaacaaaatattggcaaactgaatcaaaaagttaatccatcatgatcaggtacacttcatccccaggatgcaaggttggttcagcatatgcaaatcaataaatgtgagtcatcacatcaacaaaactaaagacaaaaaccacatgattatctcaacaaacacagaaagggctttctataaaattcaacatcccttcatgttaaaaactctcaataaactaggtactgaaggaacatacctcaaaataataaaaccatctatgacaaacccacagccagcattataatcaatggacgaaaggtggaagcattcttcttaaaaactggtgcaagacaaggattccctttcactacttcaattcaacatagtatcagaagtcctagccagagcaatcaggcaagagaaagaaatgaagggcatccaaataggaagagaagaagacaaactattcctgtttgcagatgacatgattctatatttagaaaaccctatagtcttggcccaaaagctccttcagctgataaatgacttcaacaaagtttcaggatacaaaatcaatgtacaaagatcactagcattcctctacacaaaaaacagccaaacagagagtcaaatcagaaaggcaatcccactcacaattgccacaaaagaataaaatacctaggaatacagctaaccatggaggttaaagatctttacaatgagacttacaagatcctgctcaaatcagagaagacacaaaaaagtaaaaatcatcccctgctcatggataggaagaatcaatatcgttaaaacggtactatctaaagggatttacagattcagtgctattcctatcaagctaccaatgacattcttcaaagaactagaaaaatatattttaaaatttatatagaatcaataaagagcccaaatagccaaggcaatcttaagcaaaaagttcaaagctggagccatcatgttacccaacttcaaactatactacagtgctacagtaactgaaacagaatgatacatgtacaaagacagacacataggccaatggaacagaatacagaactcagaaataaggccacacagctacaaccatctgatctttgacaaagctgattaaaacaagcaatggaaaaaagactcactattcaatatatggtgctgggataactgcctaaccatatgcagaatattgaaacctgaccccttccttaccccatatacaaaaatcaactcaagatggattaaagacttaaatggaaaacctaaagctataaaaaccctaaaagacaacctaggcaataccatcctggacataagaatgggcaaagatttcatgacaaagacacaaaaagcaattgcaacagaagcaaaaactgataagtgggatctaattaaacttaagagcttctgcactatgaaagaaactatcaacagagtcaacagacaacctacagaatgggagaaaatatttgcaaactatgcatctgacaaagatcttatatccggcatctatagggaacttaaacaactttgcaagagaaaaacaaaccaccgcattaaaaagtgggcaaaggatatgaacagacacttatctaaagaagacatacacgtggccaacaagcatatgaagaaaagttcaatatcactgatcattaaaggaatgcaaatcaaaaccacaatgagataccatctcacagtagtcagaatgtctattattaaaaagtcaaaaaacaacagatgctggtgagattttggagaaaagggaacacttatacactgtcggagggagtgtaaattagttcattgctgaaataagtatggtgattcctcaaagagctgaaagcagaactaccattcaatccagcaacytcattactggttatattcccagaggaatacaaatcattctaccttaaagatacatgtcacaaatgttcatttgcagcactactcacaatagcaaagacatggaattaacctaaatgcccaccaatgacagataaagaaaatgtggtacaaatacaccatgaaatactatgcagccactataaagaatgaggttatgtcttttgccgggacatggatggaactggaggctattattcttagcacactaatataggaacagaaagccaaataccatatgttctcacttataagtgggagcgaaacgataagaaattattaacacactgccctcctaccatccaccatggccctgctgcactcctctccgggattaccgcagccttccacccaggccttgctgctgcagcctctgccagagccagctcctggtggacccatgtggaaatgggacctccagatcccatcctgggagtcactgaagcctttaagagggacatcaatagcaaaaagatgaatctgggagttgggatgataatgggaagccgtacatgctgcctagcgtgctcaaggcagaggcccagattgctgcaaaaaatgtggacaaggaatccctgccagttgggggactggctgaattttgcaaggcatctgtagaaccaaccctgggtgaaaacagcaaagtcttgaaaagtggccagtttgtcactgtgcagaccatttctggaactggggccttaaggatcggagccagttttctctaaagatattttaagttcagctgagatgtctttctaccgaaaccaagctgggtaaatcacacacccatcttcagggacgctggcatgcagctacaatgttatcggtattatgaccccaagatttgcagttttgacttcacgggcgctgtggatgacttttaaaacatactagagcaaagtgttcttctcctgcatgcctgcacccacgcccagaatagtggaaggaaatagcaacagttgtgaagaaaaggaatctctttgcgctctttgacatggcctaccaaggctttgccagtggtgatggtgataaggatgcctgggctctgcaccacttcatcgaacagggcattaatgtttgyctctgccaatcatatgccaagaacatgggcttatatggtgagcatgtaggagccttcactgtggtctgcaaagatgcagatgaagccaaaagggtagagtcacagttgaagatcttgattagtcccatgtattccaactctcccctcaatggggcccagattgcttctaccattccaaacaccccaggtttgtgaaaacaatggttgtaagaagtgaaaggcatggccgactgcatcattagcatgcggactcagctggtcttcaacctcaagaagaagggttccactcacaactggcaacacatcactgaccaaattggcatgtcttgtttcacagagctaaagcctgaacaggtggggtggctgaccaaggagttctccatctacatggcaaaggacggccgcatctctgtggcagggataacctccagcaacatgggctaccttgcccatgccattcaccaggtcaccaagtaatgtccctggtgtgaagaaacagggacaaactttctgtcttcagcctctgttattgggatattcacacagaggatgagagagggtggatggtggtgagtggatcatttctttcaaccatagtgtgtaacactcagtgattgaatgtttctcagaaaagaacatgtagtgacacagggcagaggcattcgtggctggcatctggaacattgtggctctaaaccaaactctcccctgtccttttatctccaacttttctcgaagagtttacatgggcaagaaagtcatcacaccaaaaaacctgccaattatgccattgcaatatttcagaagctttaactgaagtgtcaggttcctcatgagaaatagcacacattagaggcactgagagaagacctagttctgtcatgaacagttggcctcgtgactgtcctcccatcatggagcaaccttatcaacagaacgcgttgcagaaattatgttttataaaaaccagtgaatctgctgccactacagcaaggaaaataatgtggtttcctgtcttatttaagaaaaagaggaggctctcttttctcccttgtcattgctgttcttttccttaccgcacaaagatttttaactaatgtagattttcatcccgttctactgcttgactgacaatcaaccccatcctatcgggatttatttaagaataaagaatataattttcttttcttttccttttaagatggaatctctctctgttgcccaggttggagtgcagtggcacgatctcggctcactgcaagttctggctcactgcaagctctgcctcccaggttcacaccattctcctgcctcagcctcccgaatagctggggctacaggcacccgccaccatgcccagctaattttttgtatttttagtagagacggggtttcaccatgttagccaggctggtcttgatctcctgacctcgtgatccacccgcctcggcctcccaaagcactgggattacaggcgtgagccactgtgcccggcccaagaacataattttctgctgatgtcaagccctcacctttctcagcaaagaatcatggagagtaggtaactgtactttatctcagcatcctcttgaatgattgtgtaatcttctccagttgggatgttggctctgcccagttggacctcctccctttgttgaatgtggttgtgcagtcactcatctcacactgtgagtccagtggcgcagggtggtgccaagaaagaggatattctaggctttatgtgctgccagcaggattcaggcttcacccgctggaaggaatcatcatttgctctaatcatgtaggcttattgcagtctggtttctctgttacaataaaattactgtagatgcccctccactcaaaaaaaaaaaaaaggaattatgaacacaaagaaagaaagaacagacactggggtttacttgagggtggagagtgggaggagggagaggagcagaaaagataactattgagtactgggcttaatacctgggtgatgaaattatctaaacaaacccctgtgacatgagtttacctgtgtaacaaaccttcgcatgtgcccccaaacctaaaataaaagttaaaaataaaaaacaagaaagaaaagcgagtgtgcagggcacactagatactatacacgttgaggtgaggacttctgtcatttttggctgtccaacatcttgtaaatgtactctatattttgattgttcccctattatgattgttccctttgtttgttagaatggtgctggcatgtgatctagagtccaccaactggacctgcagttttggagtgagtcatgtgagaaaacagactgggtaaagatgccagtggattggtttatgggtccatggtggaagcactgttatagggtgagtttcttctgggaatagtttttggaaactcagtcataagcttatttctccagcccgctgagctactgaatatcccataatatattttttttctgcttaaactagccagagtaggttctattttttgcaacagatacctagctgacattctatgggctctagataacctttgtaggtcttggctttacacctgcccctcatccctcactggtcattgagtgtatcctgtagtagagggatcaatcatgtataagtcatgatataaaggagagcacaagttaattatctccctccaccttgttattgttgattcagaggagatcatctttccctactcccagatggaaactccagtgaattccaaggcttttctatttaggacatttaaaataataagcacagtgtgaagtcagtaactataattattattattttttaaaattatttatttcaattttgtgggtatatagtagatgtatatatttatggggtgcatgagatgttctgattcaggcatgcgatgagtaataatcacatcatgtaaaatggggtatccatgccctcaagcatttatcctttgtgttacaagcaatccaattagactcttttagttatgttaaaatgtacaattaaattattactgactatagtcaccttgttgtgctgtcaaatactaggtcttatttattctttctatttttttgtatccattagccatctccaactttccctcaaacccccactacccttcccagcctctggtaaccatccttctactctctatctccatgagttcaattgtttgatttttatatctcacaaataagtgagaacaagaaattagaattattattaaacagatctcaaaatgtgacttagtcgtgcatcttctcctcctctccctgtatcagcctgtttcagcctggaagcctctagtgggaaggagggatgtgattggttgcttcttattctgatcttctttcttaccccgggacttgctgactagggagtataaaagggatagaaaaagcatcagttgaattgagtgaacaaagtcaatttaaacacggcagatgtttaaagcagaatcttccaagaagctcttttctgggtctttggaagctatgatcaggcctctcaggcttcagtttccttgtccttagcagacacttctctaatgtagatggtcacttatgcctcctgtagctcctggtaatgtaatattcatctccaggtttttgctgctggggttcttctgcctccttaggtggccatataggataagcccccaaggctcttttttacacatggttcccatcaccatccctcaccctgacaaactgtagtagtattgttccatctcaatataacagcacatgccctgtttcagccactggaaccattagcccacattttgtatcaagattctcatcagacctcaaaccaaagccctatgtctttcaactatagtggtcatatattaagctctctcagcagtccacagaagtaaaaaaccctcctatgtgtgagatgagatggcagacatccctttctaacatcctgatatagaaataaaagacaggtatatgttttgttaaaaataaagtgctttgaaaatccaataaactgaattcagcaaacccatatgcaagggtagtaagctagtcattggggatacagaaatgaataaaacatagtgtttgctgcctgcataagcagatttgtaattgcaaacaaaatagttgcagaatggcgtgtgtcagggaaaaacagttgcataaatcacctgctagaatgatttagccagaagagaagattcttaagaatgagtaataatatttttaagggaaaataaaccatattaacccaatgggaaatgcctggatgaatgagattgacagaaaaatatgggaaattctgaaattgagagagactatgctaggaatttggctcattgaggagggagtttcctttcagtttgctgcacagcagttttagattgtgacatcttgtcttgaggatataccttaagtgatatctgggagactcacagcttcagacatctacatattttgtttggcttcaagtatctatgtaagtttttgactgagaacatcagtgaatattgacaagacttttgcttctttagcattctctcagggaatacaaaagtactagaaattccttaatggatagaattattttccttggatcagtgtctcaggattctgaggtcaggaatcaggagacttaacagttatattaatcctagtaaggtcagaggcttcatcgagggagaggcgagagggaaaccttgtgaagaaataattctgtgctcaatttacataggtctttaaaataatcaaaaggaatacttgttatttcattatctccttacaacatgcctgcaagataggtagagaccaggattacttttttaaaatcctgaataagtcaacagtaaagctcataatctactggccccaagtctagagcatctgcaagagaccttacaataaatggaatgacttaaaataaatggaataaatagaaattactgaggattatacctgcaaattccttcctttccttttaatcccctccacttagagtcatcatttcagtgccaaagttttaaagtgaagctcaacaaatagaataaagaaagtaactttatgttggtaaaaggcataattaacattaaagacaaacatatggaatctctaggcacagataaatatataaacaaaatacataggaaaaattatcaaaaattaagaaaaaacagaaatatagtcagggtgagatattttagatatcacaagcagtttacaacatttgaaacattaaagaaaaatctgagccttggtttcatcatctgtaaaacagtgttaatatttactatcaaatatgttgaggttgatagtgttactatcgaatatttgggaacacatatgtaaggcaccaagcacaacagttgtcatgagtatgtgctcaatacacagtactttttaaaaagtagaaattgtagcagtttatagatgtatatacccccaaaacataggatttattttctttctgatagttataaaatgtacataaaaacgagacataaaatctgaataaactaacaacataagaaattcttcagattatgttgcttggtcacagtgcaattaaatgaaagattattgtaagtaatgatttattgttctaactattattgatgcaagaatttaaataaatcacaactaaatcatatggaaaatgtttaaaactctccagtataaccactgaaataacatgtaagccaatcagcaaataacatatttggagaaaataacaaaaatgagaactcataataaagaaaacttttggggtgaggtcacagagatgctcagaagtcaattcagtcttcattgcttttactattaatattaaaaataataataagataaagcatttcacttatttagtaagagaaagcacatctattcaaagtcctaagaatattatcagaaattaaataaaacaaaagccaaaaaagataaattgttaaggaaaaaaatrttaaggtggaattagcaattccaagaactataattacacttgcaagactgtgaatctcatcaaagaagaaactaaaatgaaaaggaagaaaaacaatgtagaagagactgattatttacaagggttccctgaataaagacagaggaaatttatcagagggttcggtggtggaagtcttattaccctgggctcagcactgcagggctttcttgctgaatttcttgccgaacatgaacgtttttaagccaggcacccagaatagggaactccacctgagacagagacagagacagagaaggagtgggcagctgcccctcagagtgagccaaatgcattaaggagagatgactttctgtatgtatcttttccattccttctctagttggtttgaaggtctgggtcatgggaggcctacatgatcatcctcaggttatgagtgacgagaaagagacaacactgagagcaggtgagatttaacacaggaggagtgtcaagggctgtcatcactactacatgcaggaccaccactgtaattatgctttagaagtcaggacactccacagggtgggtgactaaacaggagaatgctgtctagccgccaaaacctgcctcacatgcctgtagtcctgcatgccagtggctgtcaagtactggatcagagtccggctgtgccacttccttgaaacattcatgtctccggaccttactggctggaaaaaactgcagcaggaagatggccttacctcacttctagcttccaagtctcacaagagagcacaggcagaaccgaagccacatccaggacctgggctgagaacatctggcacatggagcctgtagcattctacattaacaacaaaacaagacccaaaacacagaagaagtttggaaacagatgttaagtgcttatggccatattcagcacaatgtgtttagatgcaggtttcctttcatttaccttgtttgtttggggcttcctgaatctgagaattgatgtcttttatcaattctagaaaatgtgccattatccactcaaatgttgcctgtcctgagttcctactttctcttggtttttgtcctctgaagattcgattcagcattactttgtttttttcattgactcactaacaaaggggctttgttttaagggaggtaatttacccaaaatattaggttgttttcaacctttcagctggactccactgagttacataaataataaaaatggttc

SEQ ID NO: 93505 - DNA, 15045 bp, Homo sapiens
gccccagtgggcgtgtgttacagggtgctcttagttcagccacccataggcagcttgtgttagctccattagacccctgccttatcacaaagacagaggactttctgtatcccagggatcttgccttggtttacgagaagaatcggatcacacgtgggcatggagaataagtgcaaggttttattaagtggaagtagctctcatcagatgggggagccaaaagagagatggtttttccctggagcccggccaaactccatgtccttccgctgtcaatggccttccrgtgtgctcctactgtgttcaaaattggtgggtttttggcctcactgacttcaagaatgaaacccagttctttaaggcagcgtgtccagaatttgttccttctgatgttcggatgtgttcagagtttgttccttctggcgggtttgtggtcttgctggctcaagagtgaagctgcagaggctcaagagtgaagctgcaaagcctcgcggtcagtgttacagctcttaaggcagcgcgtctggagttgttcattcctcccggtgggttcgtggtctcgctggcttcaggagtgaagctgtagaccttcacggtgagtgttacagcttgtaaaggcagtgtggaccccaagaatgagcagcagcaagasttattgcaaagagcgaaagaacaaagctcccacagtgtggaaggggacccacgggggctgccactgctggctccggcagccgccttttattcttatctggccacacccacatcctgctgattggtccattttacagagagccgagtggtctgttttgacagggtgcggattggtgcctttacaatccctgagctagacacaaaagtgctccacttccccactagattagctagatacagagtgtccacacaaaggttctccatgtccccaccagagcagctagatacagagtgtcaactggtgcattcacaaaccctgagctagacacagggtgctgattggtgtgtttacaaaccttgagctagatacagagtgccgattggtgtatttacaatcccttagctagacataaaggttctcccagtccccaccagactcaggagcccagctggcttcagccagtggatgccgcaccacggccgcaggccgagctgcctgccagtcccgcgccctgcgcccgcactcctcagcccttgggtggccgatgggactgggcggcgtggagcagggggcggtgctcgtcggggaggctcgggccgcgcaggagcccacggagcgggaggaggctcaggcatggcgggctgcaggtcccaagccctgccccgcggggtggcagctaaggcccagcgagaagtcgagcacagcagctgctggccttggtgctaagctcctcagtgcccggggccggctggccgctccgagtgcggggcccgctgagcccactcccacgtggaattcgcgctggcccgcaagtgccacgcgcagccctggttccctccagcgcctctccctccacaactcctcggaagctgagggggccggctccggccttggccagcccagaagggggctcccacagtgcagccgcgggctgaagggcctcttaagcgcgaccagagtgggcgccaaggccgaggaggcgcggagagcgagcaaaggctgtgagggctgctagcatgttgtcacctctcaccacgatggtgcattgctctccacgtccagccagttgagtgtgttcctccgctgatgtgcttctctccacatccagcgccagtgcctctggctgctagggtctcagagtttttataggcacagacccatttgagtgagaaggcaggagtgcctgtcctcatgtaggtccgtaggcacaggcccgagggtggagccctagttaggtacccgcctttctctacccagcacttcccggccgcccctcccccatcaccagtgattaccccattggcaagcctggaaaggcccttcagtggcatctggagaagttatgggcctgattttgggggacaggaattacaatataagaacatgtagatgagaagtttgtgcaaaacttacttatgagaaatcctgcaaaatctgttaagagtatctgagagaggacggcatgacttgaacggagtgttaggatgtcgggggagaatgcagtgtcagggaacagaggtaaatgttattaatcttctggaaacgggaagaatattatgaaatgcttgtcttgccacacacacaaaaaaatggcttgtaatttagaagacataaattctagctatggcatcagctctaactaaaaattttacttggaaagatcccttcagttcttagaatttcaagatattacatgaagggtcttcgagtgttttgaaaaagtccacaaatgttgggaattattttttatcttatatcgttatggttatttttgtaaaattccaggtggattgcaacaaaggggtaacaggcaccatctatgagtatggagccctcaccctcaacggcgaggagtacatccaattcaagcaktttgcaggcaagcacgtcctgtttgtcaatgtggccgccwattgaggcttggcagctcagtatcctggtaagaactcacgtttcaactcttttggaagcagcattgccagatagccatattctaattccagaaggttttaccaatgtgttattggaggatgcgatgggagaactgatcaggtgactctacctccctaaatgctgctcctgctctgctccttagaatatcaggataattatttccagatttgagaactaagaccttcccaaagacttaaagaccaccaggagcacacttgcagttgaacaagttgaatgtgttactcggtaccctgaaggagaacatgttctatagagaaccatggggtttcttaataagaaagtattagaaaggacttactatagaatctgaacttttgttacgtgatttggagacgagttcaaggaattgaagttctgttctggattggatgccatcaagaactgtgagcaattatatgatttggtgtcttaatcaatcatatctacatggggagagaaacgaagactaaagctgtaactggtaaagaagcagcagtcactcatattggcaagaatagggtggtacctggtcattgttgcgatttggacaatgttcgtgctttgtctatgttcagttacaattatgcagtggccttgtttttgccttgattcatcatgatcacatgttatgtgatattgtttgtatgaaactgttctatgaagttgtttatgtttcctagcagagtgctaaagcctagctgtgactcccaggccagatacctggctttcaaggactgattttatgcttctcatcggttacttctgataaaaacaggagagatgagtgatctttgatattctggaaaatgcccttgggttctgtaggcacctgcaaatgaccaagagggaaatgaagttttctgtctgggcagcctttgattggtacaagggctgtgtagtgtgactggcaatgtagaagaatgctccatctcgccaaccttggcctaaccttctgtggtagctgaggtgtgtttccattttctttgtgcccttattggagaagagttttgcattactgttggtccagaaaaggttatttaaaattttagatcaattatactagagatagatacagctttggacgggccaagaactttattttatgcttttaaaaaatggctcaagataaatttaaaagatttattgcaccaaatgccacagagaagtggatcaaaataatacatgaacaaattttgttttgttttgagacagtctcgctctgtcgcccaggctggagtgcagtggtgtgatctcagctcactgcaacctctgcctcctaggttcaagtgattcttgtgcctcagcctcccgagtagctgtgattacaggcatgcaccactatatctagctaattttttttttttttttttgcatttttagcagaggcagtgttttgccatgttggccaggctggtctcgaactcctgacctcaaatgatccacaagtcttggcctcccaaagtgctgggattacaggcatgagccaccgcacctggtctatacaaaaacaagttttaagaaaaattttccacacattgacactattatctgttcagctgatcaaaaatatataaaccctatcaatttttcttaatggattttcagtaataaaaatcccagaattttagcccttttaagtaacacttaaagtcaagcatattgtaatctcatgtctaaaagatctggctcaccaaattttgacattttaaaattaacattcagaggatgctacatgatttaagccaaaattctaataaaattccggctcctccaaagtacaaatggctcacatttaccaagagtagctgaatacttttccaatttaatggtaaaattatgcataaaaagatgctctcaaaagtacagattaggataagaatcacacatttaaaataatttgggggtccctttgttattactattatttttgagacagggtcttgctctgtcgcccaggctggagtgcaggggcacaatcttggctcactgtaacctctgcctctgggattcaagctattctcttgcctcagcctcccaaatagctgggactacaggtgcatatcacctcgcccagctaattttttttttttttaatagagactgggtttcactatgttggtcaggctgctctcgaactcctggcctcaagtgatccaactgcttcaatctcccaaagtgctgggattataggcatgagccaccacacccggcctcaatttttttatttttatgtacactcaagtctagggaaaacctgaaaagctacagactaaatttttattataagagcccaaacaacaatttagtatcatttagtaagtgagaaagttaaaagaacttgccaaaggaatagaatcaagttctgccaattgtgtctactataggacctcaggacctaggtattagagcccaaacgacagttttgtatcatttagcaggcaagaattctcctcccttcaaaaagttaaatttgaaaaatatggtaaattttaaaagttgtgatgtgtaaacgcagttccatggaatgtgaagctgctcttaaatttgttttaatttaatttaattttaacttaaatttgctacatattgaataggcaatatacttccaacattcaaaattcaagagatataaaaaggtttaacagtggcacttgccatgttcccttctctttaggcaaccattattatcagtttatggtgtatatttccagaaatctgttatgcatatacaagcaaacatttctctctcactttctttctctcaagcacatacacatacacaaacatacacacagaaatgattatgcacattgctttttcacatatatcacatacagtggggacaggagtggtggctcacacctataatcccagcactttgggagaccaaggtaatcccagcactttgggagaccaaggtggccggatcactcttgaacatcaggagtttcagaccagccttgccaacatggtgaaaccctgtctgtactaaaattacaaaaaattagctgggcatggtggcacatgcctgtaatcccaactactcaggaggctaaagcatgagaatctcttgaacctgggaggcggagattgcagtgagctgaaatcctgccactgcactccagcctgggtgacagagagactctgtctaaaaacaaaacaaaaaaacatggtgagcttcctcattcattttaaggcatagtattccattgtgttgctgtgatataatttattaaattagttcatgagaattttaaagagcacctcattcaaattttactccagatgagaaaattgagagaattaaagaaacttgccaaaggaatagaatcaaggtctgttaagtgtgtctgctatagaaaggaaatattcttgatggccaaagataagagagagatgagtttcgatagcaaccgaagaactatagaaaaacaggaaggcactctctatttaagaggaggttcttaggggacattccagcaggcagagctgaatctgaatgacaatggccagtacaagttctgaggtctgaataaatcttacctgaaaatagctgaagatggaaattatgattcaagtctaaacagacaagctggaaggttcctgacagtagtaaagagcaatttggagtttatggcctggcgtcccagggagtgttccagggcatgttgcagcatcagttaggtcactggaattgaggagagggtacagaatactgtagaggatagccttggaatttctctttctctaccactcccagggtggagcaccaaggagtactcctgggaatgggactggaactggagtgtctggttgtgtcaccatgggacattgtatgagtggggccggggggatgcagggataggtgggtaggatttccattttgtttgctttttccttacaattttttttgatcaattcatcaactaaggaagacagtggcattcaaatctgacttctctttagagtcaaacaggactcccacacaaggctaccaacgtktgtgtgtgtgtgtgtgtgtgtgtgtgtttaaaaaaaaaaataagagttctcattggatggtaaagtgtagccaggcatgggagctactgtataagaaaaacagcagccattcagatgcatttctggaaacgtgtgctctagtcttttttttttttctctactcctttgatctctgtaaccttgaatctttcccttcttagtcctcggtttattcatgtgataaatggatacattcagtgatctttcactgcttgaggtaggcctcctgaccagcccacccctgctattcattstccacttacagaactgaatgcactacaggaggagctgaagaattttggtgtcattgtgttggcctttccctgcaaccagtttggaaaacaagaaccaggaacaaactcagaaatacttcttggtctcaagtgagtgcttgcatgggaccctgcagatgccctgtcgggatttccattcctcattccacctagatgcctgcctattctggaaacttctgggataggccatagatacatgggttgaagcatatccttatgatgttttgaattcaatctattctattcacagtgctcaaatattctctttacttttgaattatttgatggtgaggctaagggaagattgaatggaaaagaagcatagagaaaagaagggagtataagaaataagaaatggaagtgaagcaggaaacctaagctcaaaatattgccttccaattttcttagaattctctattggcgccataaagcctattgcataaaatcctgcttcccacagactatcttttcttatcttccctgtgcacagcctcttccctttatcttgaatttcctgtggtagtgaattggtggtggccattattttccatccatgtcttaatttgtatcttgctgggaacaactttggttcactgcaggtatgtgtgtccaggtagtggctttgtccccagtttccagctctttgagaaaggggatrtgaatggagaaaaagaacagaaggtctttactttcctgaaggtgcatgagtataaacctggcatggatgggttagctagaaatgctctgaaagcagtggggctcatgtctagggttgtggttggactccttggaaaagagatgctcagataagttcaaggctcatggcaatatctgctgtgatgctttagctttamgtagaggaaacccatgatggacaatagctctgacatggactaccctcctgtattgaatggaatgattcattcattcagcaatcatttatcagatctccagtatgtgctatatgagttaacaaacattaatagcgcatagtctgttccctgaaggaactcacatttaatcaggagacagacatggatgatacagaataccatgtggtaaatgcttttagagtcacagagtggtaaaaatacagaataccaggatagaaggacccccgagggtctctttgtctactcagcccgaaatgctggtctgcagaacaatgctggtcctgctgaaattttcactcatccacagcaaacaagggaaaaaagacaatgcagaatttttcataaagctcaacttattgaatataagaccaacatttattctgacattaaattactattacgtttacccatataaattgccctttacttactcaaaaatggtgctataatcaattttatgtggtwcaactgagtatttaaaaatcccttaatttttaaatgtgtgcttacagtagacttttaatttttcttattggcaaaatgagtattagtgattctacgttaatatccaaggaaatagttattgaaattttactggcttatgaagcctatgaagccccaaactctgcgagccactactctaaatcaatctctttttttttctgctaaggaaacgaactgtagaaatgatatgacttgcccaaggaaacagaaaatagtcttttactgaatcatcgtgataaaaccatggaaatagaggaaagacagggaaaggaggaatgctttctatttaccattatactctctaactctcggttatttggtagttggtgtattggtattgatacattgcagtgtctgtggttgattggaagcatgcaaagtagttaatatattaaaatacataatggtgagtagactctctagtctggagataaaactgtaccacacagaagtagaaataaagtagaaataaatgtatatctctactttctatatctctgctccagaactcctgccctccgacctctgatcttttgggctcatcaagccaactcttctgggagcccatgaaggtccatgatatccgctggaactttgagaaatttctggyggggcccgatggagtccctgtcatgcattggttccaccaggctccagtcagcacagtcaagtcagacatcctggagtacctaaagcagttcaatacccactaggaagggctagygactgacagaaataactaccctgtctcccacctgcaggaatgtctaacaaagcatccatcttcctccttctttgctccacactcgtgcctacccagcctcctgatgaccaaaccatcctgtactacccaagcacctgcttagcatgtgtgtgtagctgtgtgtgtgtgtgtgtgtgtgtgtatggatatgtagaattgtatttgttggtatatgcataggtgtatgtatggtgtgtgtgtgtgtgtgtgtgtgtgtgtttgaagattaaggaaaagaacacctatctctccaactctctgatcctgaaatatctattccaaaggaaaatcatattttagggtagatgaatcagactatcctgtgtccctaaaaaagcaatcccgagaagttgtgacatctatcccttccccttcctgaaagttttaaagaaagcaggagctggccgcaagactctaggcctccttcatagcctctctcctctaagataggcatgcattgttaaactcttttctccttaattctcctttattcccctgccacccagtagttctcatgtaggacctctgaaggcagagtgagagcagaaaccccacctcacatgaagggaagggcatctccatgatggtggatcccaaaacccctctgggtcgcaccctgccagagccttccttggtgcctgtcccttagtgcattcaggtcatggcacctgggcaggggtgtccctgtattctgaatgatgggctttctcctcaccctgagcctcctcaactttaagcttattttgatcactgtctcaaatttaaaaattctgcagcaacctggctctgtgtggtgttttcccagtcccatattatgtccagtcatacttcttctttctctgtcactttgtccctgctttcttgattcccttgtcttgttcttcagtattttgtttttctcaaaaatgctctagaactttccttggcacatataaaagcacggctggaactggttgctcagagctgctgtgaccgtgagcacagatctcttcgtgtcaggtccctctgcaccctcccgttcaggtctcttgaccaggcccctacatgacaggaatccttgcctctcaaagaatcctctctctctctctacaacaaatatgcatatgtttgtttttttttttaagtatttattgatcattcttgggtgtttctcagagagggggatttggcagggtcataggacaatagtggagggaaggtcagcagacaaacatgtgaacaaaggtctctggttttcctaggcagagggccctgctgccttctgcactgtttttgtcgctgggtagttgagattagggagtggtgatgactcttaaccagtatgctgccttcaagcatctgtttaacaaagcacatcgtgcaccgcccttaatccatttaacccttagtggacacagcacatgtttcagagagcacagggttgggggtaaggttatagattaacagcatcccaaggcagaagaatttttcctagtacagaacaaaatggagtctcctatgtctacttctgtctacacagacacaataacaatctgatctctctttcttttccccacatttcccccttttctattcgacaaaaccgccattgtcatcatggcccgttctcaatgagctgttgggtacacctcccagacggcgtggcggccgagcagaggggctcctcacttcccagacagggctgccgggcagaggggcccccccacctcccagacggggcggcggccgggcagaggggctccccacttcccagaccgggcagctgggcagaggcgccccccacctcccggactgggcggctggccgggcagaggctgccccccacctcccggacggggcggctgccgggcggagacactcctcacttcccagacggggcggctgccgggcggaggggctccccacttcccagaccaggcggctgctgggcggagggggtcctcacttctcggacggggcggccggtcagagacgctcctcacctcccagacggggtggcggcggggcagagacactcctcagttcccagatggggtcgcggccgggcagaggcactcttcacatctcagacggggcggcggggcagaggcgctccccacatcccagatgatgggcggccgggcagagacctcctcacttcctagacgggatgacggccgggaagaggcgctcctcacttctcagactcggcggccgggcagaggggctcctcacatcccagacgatgggcggccaggcagagacgctcctcacttcctagacggggtggcggccgggcagaggctgcaatctcagcactttgggaggccaaggcaggcggctgggaggtggaggttgtagcgatccgagatcacgccactgcactccagcctgggaaacgttgagcactgagtgagggagactccgtctgcaatcccggcacctcaggaggccgaggctggcagaccactcgcggtcaggagctggagaccagcccggccaacacggcgaaaccccgtctccaccaaaaaatacgaaaaccagtcaggtgtggtggcccgcgcctgcaatcccaggcactcggcaggctgaggcaggagaatcaggcagagaggctacagtgagcccagatggcggcagtacagtccagcctcggcccggcatcagaggtagacagtgcaaaggggagaggaggaccgtgcaaaagggagggggagggggaggtggagggggagagggagagggagacggagagggagagggcatatatttctgtttataaaattaattcatgctcactgttaaaatctgaaagcacataaaagtaaaaaagcataacaaaacaaagtggaacaaaacccactcctaatcagaggtgcaaaggacctgctaggaagccctatctgccccgtgctgttttatagttaaaatacagtgttttataattcaagcagatttcagaaaaccagatattaaggaaagaaattagatgaggaagtaaaataaaatcactgtttttctttctctttttacaaattacttggaacataggtattagcacttaaaaatattttttgcacttaaaaaatgcaggaaatttaaatcagtgagtaatttcaaacattatggggatcgtaatcctgctgtgtacctaaatagaaatatgggctgggcacagtggtgcacacctgtaatgccagcactttgggaggccaaggagggtggatcacctgaggtcaggagttcgcgaccagcctgactaacatggtgaaaccccgtctctactaaatacaaaaaatttagccgggcatgatggcatatgcctgtaatccaagctacttgggagaccgagacaggagaattgcttgttccctggaggtggaggttgcaatgagccaagatcgcgccattgctctccagcctgggtaacaagagcaaaactccatctcaaaaaaaaaaaaaaaggaagaaagaagaaatgtgatccatgacttaatctttattcagcaacatgaaaattgactaaaccaaaaactgttaggaaaatgatttttaagaccttaaaattcataaatggtggatatttgatacatgaaaaatgggaaatattatcaaaatatttggatgttttctcttcttaaacttaacatctagtaagaaaaaatgagttaaaaaaatcgggctttccttggctgtaaaccataggatttgagatttccataaatcttttactaaccrctatggcggttgtgagagcagtgaggagattacagaaccagctaccagtggtgttaagaaatatgtttcattttttagcttcttttaaatctctgaagtggttaagtacctctgggaccttaatagtcttcagaagggttccagacctggtaagatctggataaccaaggtccagaaagtaggtggagaggatgagctgacacaatgtataaaattctctccagttactggttcagcctaacccaggaacctgcagttgctccaggtgaccaacattcctatagtaatgaagaaagaggactgcagccttcagcctgaatgctttgtgcctgagtatgcgggaaaggtcttcatcctgccactgctctgaaaatccaggttctatcctcctaatgccttccagtggctgtccctgaagagaaaataaacatttttctggagagagccaagaccatagaaatgagaaacagaaatgtccttgcagtgggaggtgggcataggtgaggggcaggtttgggggccagaagtccagatcagaatgtcacaaatgatgacaatgatgataatgatggcaataataataatgtaaaatataataataatgtaaaatgtctttataaagagaggatcaagacataaaaatttccacttctctcctcctcaaccaatcccaatagcagagcttagtccccaacgaaagttacacttagaaccttctggaagtgggtcgacttctcaggagtgtctaaggagctccagtctgtcatagtagttaaaaggttactatcaggtgattatcatcattaccatcacaggcactattattgctgtggaacttttttcttctaaccagaagttcccacaacttattacgcaaatcaggtacactagagctaattgggtccataaatccactaccccacaaacaacctaccaggcatctagaatcattaaggctccactgatcacaaaacttttggagagagttctcaggcaggacgggaaggttctaaggtcctagaaaaccaggactcagaccctctctaatcaacctattcccagatttgcaaagcagcccatagcaggaggtaataaaccactgtggtctcccctgtggcagttagtctgtggatgtaatatattttctgtggactgtgtggacacaggtggctcttagccttggagagtacccgtgttaattctgggaggtgaattctcaaaatatgagaagtaggacacagtctatcccagagcacatcaaatattgcttctgtggtcttatgaacacctcttgacttggcttctgttctccataaacagaatctgagacaagaattgaggcacatatagcttattgaaagaatggtctcagaagaagggaatctgtgaagcaggataaggccaggaaaagagagaattaaaatgcaatttctgctggagcttagcttcagaaaaaatcacactataatcagtcccatcttgaaggatgagacatagcctcttgtagcccatgtgagtcagtcattggcttatgggcccacccttgaactctagaggcataaactcccaggcgaggtggctccctttggctgaagaaaattctttggagaaggtggccactgagagttaataccctggagaaggagcagctctgagccattagcagccaaaactcacagcaagtggagatgcaggcactagcccagtaaagcccatctgggtaaggctgtggagaccacctattaccctccacaaatgagtcattattgagggaaatctcgagtagaggccctgagaaaaggaccttgacaatcagtcatcattttccctttcttgacttctgtctctaggaaattgattctcaaagcatagtcctctggccagcagcagtagcatcacttgagaacttagaaatgcagttttcatatctctcctgggctcactgacccagaagccctggggtaggtccagcagtctgttttcaaaaggcttccagttgatcctaatacatgctaaagtttgaggaccactgctctaaggaatggagaatttgcagaaaatattgtcattttgacataggatgagtaaggagaacttctcttgtacttcatgtggctactgactgctctgcacaatcaagccacactgcctcccactcagtccttaggtgcccccagggttaacatggacaatccagccatgcccttggtttattagtttcctcagtct

SEQ ID NO: 93506 - DNA, 30756 bp, Homo sapiens
cattcccaaatctgttaacaactctgccagaaagcactcttcatgagccctatgctatggatggagaaaccaaggcccgggtctccctcacacagccaagaagtggccgaagctgaattccagcagtccgggggaagcaacacacctgggtgtacccagtgcgagcctgaccagccctgtggcctttggccatgtcctgtctacacaagtgggtggcgatggacagctcagctgcaaggcggtggagtgccgttaggcaagccccagtgcagggcccgcacgtggaagcccagctgccttctgagtgcttgctcctctgagagcatcctgtgggtcagccctgaggggttcgttgcccccattttaaggatgaagaaacaggtggagagagggatgggacttgcccagggttacacagccagtcatggggggagctgagattggagccctgaggacccagaggtctggctctagcaccctcccatccacgctggcccttttgcagcacagggagggcgcccttaatgggggtgatgtgagactgtgatagaataagaaacaggctttgatctcttccctgttcctgccacaaagctcctgaggccctggtagatggaaactctaggagaatcttttgttctaacgtttgatctttgaccctggttcctgacacagagctcctaaagctgttggaatttcctgggtgacaggagcagagctcttttgttctaccgaggggactcttggcagatccctgatatcctcaggattggggctggttgacaagggaaccaacctgtgattagagggttggaaccttcagcagcctcctgactttggggaggagagagaagctgaaggctgagttgatcaccaaaggccaatgatttagtcagttgtgtaggtcatgaagcctccctaaaaacccaaaaggacagggttcagaagagcttcccagcagctgagcacaggcagattcctggagagggtcatgcccagagaaggcacagaagctctgtgcatcttccccacacctcatcctgggcatcttgtccatctggctgttcatctatattcttcgtaatgtcctttataagaaaccagtacacatcaataataaagggtttctctgagttttgtgagccacagtagcaaattaaatgaaccctggaatccccagtttatagccagactgtggtcagaaccacagtccacagaccacaacctgtgcttgcagcatctgaagttgggggcgatcttgtgggactgagccctcaacctgtgggatctcatgccatccccagcaggtggtgtcagagttgagctgactgggacacctagctggaggagacacccagctgaaaagctggctgctggaaaaagcccacatgtactttggtgactggggcgtgttgtgttgtgttgtgtgaatgaagaaggacaaggtttgttctcatactgggcctgtggcatctctgctcctcaccagccagggccacctgggacagagcatgcagaaaggtgctcaggcttaagcatcccacactcaatccttcttatgacaggtgctgttgcaggccctgggaacagagtgcacaagacagaagttgtgcagcctggacgccagcggccagcaccttcggctgtcttctcaagggtgtcttctggtgaccctgagtgtcttcttcccactcagagggcagctggaagggatggagaattagcagcccctccccacctgcccagggaacagcccctaagcacccaggtcccttgcccctcagggtggggagattgtacctcggtcagttgcttcccctgcccagctcactatgcactccccaacagacagacccttaacaaactgcaccgagacctggtctcagggcccactgcacaggacgccccacgtctcatggctcaagagcagccagaaatccagcaggttttctgaaatctcctgagttttaaacatcagcaaccaatttgtgaaaaggtgaacattgtgcagaagtcgtgtggatggcgtccatgtcacatccccactgggctactgcagtgtggttctgcaagatcttagcactgggggaaagtgggtaaaggggacatgggatctttcttccttacaactgcacacaaatctagtgaccccagaatagtttaattaaaagcaaacaaacattgcctaactatttaaaagcacaaagatcttggctggacgcggtggctcatgcctgtaatcccagcattttgggaggctgaggcgggaggataacctgaggtcaggagtgcaagaccagcttgggcaatatggcaaaaccccgtctctactaaaaagacaaaattagccgggcatggtggtgggcacctgtaatctggctactcgagaggctgaggcaggagaattccttgtacccaggaggcggaggttgcagtgagccgagactgtgccacttcactccagtctaggcaaaagatcaaaaaaaaaaaaaaaaaaaaaaagagagagagaatgaagatctcacagaagttaaatatggcagactgctagtttcaaacaaccctggctacatcactctctagctgtgtccttgggtaagttactgagcctctcattgcctcagtttcctcatctgtaaaatgaaagtctattatatacctcataggatgcatctgaggatcacatgagataacacacatgaagggcttagaatagtgccttgcacagaatacgtgccagacaagatgaagtattatttttctaacggtttcctccatgaaaaaaaaaaaagcatcatctctcacagagacagctctggctcctctcctggcctccacctcctccctgcctcccacagagcagcagaggtgccatctgtgattcaactgttcttcagggacggcttccctctgtgcttagaaaaacccacccatgggatctggactccctgtctgcctctctgacttcacccattcactctcgcccactccagaacctccctgctattcctgggacaggcggtggtggttctaaaacatgcccgcaaattcctgggcactgctggtgggtgtggccccactcctgagtctggtccagcctcagcgatctttgggtaaccaacaaaaggcagccccaggccaggtcagaaaatggccacacagccaggctctgtgggagcagcacaccgggccccaggctggagggtgccccgaggatgtctggaggccagagggtggcccaaggagacccccagaatggaggctgcccccaggaggaccccaggccagagggtgccccgagggctggagggtgccccaggaggcccccagaatgaagggtgccctgaggggatccttggatcgctgcccagcagagcttccagacggacaccacctgccagtgtgagccagtgggacactgggcctgggtgagcctcccagtgatgcagtgccagctgccttctgactgtggcagcctgagactcccatgagcactcagccaagcccatgccccaattcccaatacacaaaattgtgagcaaaatttaaatggttgtcttaagcggccaaattttagggcagtttgttacctagcaacagcaactggaacatcacctcagggcctttgcaatggtacctgctggcttctgctccctggagtcacatctctgctccaatgccacctcccccaggcctgccccggcaccctccttgcaccggacacactttccatcctggtacccgctgtgttttcttcacagcagcattcaccgctctatctctctatcctgattttccgtgcttccaatctgtaatggaaatgctgtgagggcagacactgcatgggtctcaccctctccacccaggcctcagcacggagtgggtgttctgtatctgtcgaatgaatgaatgaatgcgagtccctgggagagggcgtcttcgcagggaagctccctaggccccgggcgtctagccaggcatctgcaccctcccaccccaagacccaagaccatctcttcctttctccagggaccccatttccagggacatctccggatgaagggctgagatgttattcccaactttggccaccaggtggcagcatataagggcaaagcgcgctgaggattccaggctggcagtgaggccagggaatgccggtctggggaaatttggaaggcacctttggatgcgagttaggtccggcagggaatgcagatgacctggaatccctgggtcctgggccagtctgggggtgggctagaggttccccaaggccagaaaagtcatgataagaagcttctagcttactgtgagtctggactcccacccctgtcctttgagaacatcatcaccatttaaagctgtatctcaaaaccagcagaactattatttgcttaatattcttccttaaatagatcttccacaacttaaataaatatagtagggagaaatttttatttcaccactttaacagaaaccagccacttgccagaaacaggcagtaaccataaacaaattaattactaatatcaaatacttacctggcactcactgagtgccagacactgttgcaaacatttcctgtatctcatttaatcttcacagcactgaggtttaggattatccccccgtacaggaaaatgggaaacagagaggtgcagttaatttcctaatctcccacagcagtaagcggcaccaggtgggtttggagtcaccacatttttcaagaacagtttaacaactggagcttcgagtgtggaataatagacactggagacttggaagggtaggagagtgagcgaggtgggagggatgaggaattacttaatgggtacaatggacattatttaggtgatggttacacggaaagcccagacctcaccactgcatatctccatgtaacaaacctgcacttgtgtcccttacatttatacaaaaaactccaaaaaaaacctacagtgtaatgtagtaccctatcccatgcactcacactgctaaatgttgtttccaacgcactcatccgcgcacccagtgccagctgcaccctcccgttccctgctagcctgacttctgggcagcaagaccctgcggttagacgtgggctcctgcccacagggctagctggatgtgtgtgtctttcaaaggctggactttactctcacctcgccccctccaccccccaacacacacacacacacacacacacacacacacacagtccctggcaagtcctcagagctcacgtggtgcccagagaagttgtgggtgacacgatgaggcacaagctccattccccgggggatgtaagctgagaccctacctctctgtgcaaaggctagtgccacctgcatgagctagattcaggcaggacctggagaccctggaggaaagcaaggctgcagggtagccttgggtcggggagggagggacactcttaggcctcttactgagggcgggggtcccggagagccatggacagggcaacgctctactaggctccttggttcatcccagatcagcccttgggcccctggcatctaaggcagcaaaaaggcaaggggacaccgcccggggtggggcacgccaccgcgacaatgcctcttggccttgggtggataatggcacccctgggcaaaccctaggggcggggcccagrggcgaggggcttccccaatcagtctccgccctagcgccctggacttcggccccattccattgggtgagggtgggggcacgaaaagaggaccgggcttgcggccccaccgtgtcccgcctcctcagtccccagcgactcgcaggggctggtggggctggggtccagctgccgtgctcccctgccctgcgccgcgccgcgcgtcttggtaggcgctgcgctgccggggccgggtcctgggccagtgcaactccgcccccagccgtatccagcggactgtcctccgccgcgcgcccggcacagcatggggaggcgctgctgccggcggcgcgtgctggcggccgcctgtctgggcgccgcgctcctgctcctatgcgccgcgccccgctccctgcgcccgggtgagtgcccgccggccgagccgcgcacccccaaccaaacctggctcctcgcgctttccaccgcggcctgacccctcgacagcgcgggggacacctgttgtctccttcctggctggggctaggggtggcgggcaggggcgctggtgaggcacagaaaggctctagacgcccccgcgagcaaaggctcttgctcctcctccggagttacctccccactcccagagcggtgactgttttgagtcccacagccggtgcctggagaccggggtcagttgtggggggtagaggacaattggccaatccgggaaggccatctcccttaccttcacccccttcccctgcgcaccccacggcccctggacatgagcgctgctgggcgcatgcgcataggaggggaagcttgggccactcggtccggtcccttggttgtcctactgtgcagtgggtgccactccctgctccaccctgaaatccacactgggtagggcttgggactcctgtgcacccactcgtggtctggctggggaaactgaggcagttagtcatgactccgcagagctgagtgccctgggctccaccggtgctgagtctttgctctgagtctctcctcagctcatgtgaagcctcccatcaacccatttcacacaatctgaagcgggccagagagtggggagacaggtgtggtggcaacgtgctggctatacaatctacttgggactggaggggcccagccagcgcccgggtctcctgacctcagggctgtttgcctttccttgtatgtggtatgcgtgctgggtgggacgactcagtccgcctccccacccccagtgtgggctctgagaatcctgggccccacccttggaacctggcagacacagtcccagggagtaagtaactaggtccagggtgggcggggatgttgggcagtgggggtgggagtggcccaagacttgaggatatcagggcctggggaggcctctgcccactccccctgaccctcacactgccccttgccccttgtgtgtccagacacagcaggtcagacctggatgcctccccaakcccatgggatagggctggggtgtctctttccagcacccccacaaccccttctgtgagctgtctggtggtgttgagcagacaatctcctggcagtctggggtgtggactcagtgtctgtggctgccacagcctctgtccaccgagtcattcagtagacagatgtttacccagtactaagacagggcagaacttggtggctactggcccctcagggctcagcgtgggatgttagaggacacctgagtgcctgggtcccggggagtgtctgcaaaggagcatacatctttgagtgactgcatggagtgtctgcgtccccatgtctccgtgggacacctctctcctgtcacctactctacccaggtttgagggatgagaaacaaaccaaggtactagtcaccttctgggctttgttccttctgacctccctccctctcctgcagagcctgggaagagacagcaggtgttaggaggacggctccgaacctcccttcccagcctctgcgcaggctgggctcyccacctggcctgtcctgctcttggccatgacctcacccagcatctcagcatctctctctgtttctgtcaagcgctcttgtacctctcccatggcctgtctccagccatcacagctttgtgagtgaccttgggcgagcaagagttaatcagaccaacctatccagcctctcacactggcttttctctctcccaagccctgagctgaagctttggctgagactatgcttgtgggcctgcaggtggcacacagggagggcactcagctgggaaaggccttttcctgccaggctagtcctgctggaggggcatcccctgcccttggcctctggaaatggcctcacgagggcctgcagtgtctctgcagccatgcctgagttggaagggatgtggtctgtgccctgtgagggcttctggcctggggatgagggctccagaactcaggagggatttcagccccttctcccaggagggcaggcccagcactgtcccctccttctccagagcaagaggcccagcactgtcccctccttctccagagccagaggtgctgccgtaagttgggcaaggggccactgaagggctactggctcaggcctggggctcttgctaccccagggagctcagagacattctagtagggggaggtctgcggcagcccctccacagccacagcctcagccccagggctccaccacctgcactggcctactgcttagggtcccagggaggaggagattccaggaaggtggggcagctgcccagagcactgctgccctcatcaccccaccctcatccccagtgcccagcggcagctcccaatggcagacccctgggtctcctgcggcccccttggctccctctgtgtttttgcctgggcatggtgaccatgcttcccgtggctggcacaccacggaccacggacctgttggttgtctgctcgtgcaggtactgggagacagtggggaacaaaacttaraaatacccctgcctcgaggagcttacatttttaatatgaaaacccaagatctcagctctatgtcttctgcctctgagacaccggcgggagcagtgttggcaccagcccccttcccctattccactcccgyggctgcagggctgagcatctgtcccagtgtttggagtcacaggtgttcctcttggagccaggtgggcctctgcatcccatcccagcccctgctcacccctaggcaggcaaggaagmtaagactgtgggccacccaatggcacacagtggtagcctcggcgaggacaaacccaacccaattcagactcccttcagctgggagggagtgggtctgtgcctgtgactgaaaaggccaggtgcctctgcctcggacaggcatagatcttggggttcagatcacacctccagctgtggtttagcttttctctgccatagcctcactctcagctgcaccagttcagcaactccaacccaaagctagagagggttcctttgccactgattccagccaaagtcccaaggaggcatccattgrcccggtctgggtctcaagtgcccgtctctgagccagtcaggtggcaggaagggctgggaggctgtgattggacaggcctaggccacatgcctatcccagcaggtggtggaggcgtaggggagcctatcggaatcacatgggctgaaggcctggcagscatcctcctctggtgggtgggcaaagggaggggaagtggctgctggagccaaattggtagatgctccccatgctgctgtccatcttcaggtactgctggagtgtcccragttcagaggacctccagaaagtaccgtgagaagaggcaagctggcaggtgggtggctctgcagaacaggaattggcaatcctattttgcagaaaagaaaagatcaagagagaggaagttacttgctcaagtcaggaagtatggggccaggatttaaatcccagctgaaaccccaaatcctttttctttccattctacagggcaggggcatttgtgttgggctttgaaagctgcataggagtttaacaggtaggaaaaggaggagaggaaactgcaagcagaaggaatggcacagagaaaagcatggaggagtgaaatggcctggggtgtgaatggatgtgctgtgggtggggctctgggtccttgagagagaatggtgggatggaaggcaggaagatactctaagttggggctcagtcatgaatagtcttgaatgggatgctaggggctggggtgctcttcctatggctgtcagagggcatcagtctttaaataaatagtcactggcactgggcaaggttgcaggggttacagaaaagcaaaaagtccccttccatgtagawctgaccttccagagtgatcaacctacacagaactcaaaagatttcagcaataaagagtgccgtggctggagctgagcagtgaaccaggaagggtggtagtgcactggtgggccttggggggaaccagggattgctgcaaggagtgagaagccctgtgggtttagagatcaccaaggtggggcgaggagaaataggagataggtgaggtgtctccttccagtcttggtaattgttccagggagagccctggggcctacccrgggctggccatgggcagggaaggtggaagtggggtccggagggttctggaggcacagccgacaggactgtgctcaagggggatctgggcagactggggttccattctagatggcctgtggagttcagcaaatggagtttgaactaaatacacgtggagagatctctagttctctcccctaaacagaattgcttataataatacatgaagggcttgtccaatgtgtccttcccttgggcctgatccccagaaggaatgtccctgactctgagacatgcaggtcaccccagaaagcccctaggggaaggaatggggcaggacagaggccctcggaggcyacgtgggaacctatgcctgctggcaggagcttgctggggcctggctgccctgyttatctcctcttgcaacactgtaacctgctggaacttattaaccagaagccgagtgtcatcatctctgcttgctggactagggagtctgcaaacagcatccccctacatgatggctgtgccctcaccctgcacagggcgcgagccctgctttggctgaggtgggtgtgcagaggaggatggtcgtgcttctgctgtaggtttctagtgtggtgtttcacccggtatcttgattggcagaggaggccttgcaacatgacgtgtgcgggtgtcctgtgtgcagcaatcgcatggccttgagcagctctctctgctctccttccctgggctggtatttcctcatgggtcagtgaaatggggcccacttgcctacggatgccgcaaggggggacaggtgtcaggacaagggggcacccagaggcagggcagcatgggtgttaagggtgcagatgctggcaccggtggcctggggtcaaattctgtttctggcacagcaaggaagctgtgaggcctcgggcaagtttctttgcctcagtttccccctctgtcaagtgggataaagatagtttctacatgagaggggtaagcatgtcagtgtgcactaagcacccggcactgtgctggggcctgcagtccccaccatgctttgtctccttctgtctcttccttctctttctcccagcctcgggccctgtcgtccatcactgtctccctgtctctgtcattgtttttggcactcctcccatccctcctcccctcccatcatcctgtcccccttctctcccctgtctccctaacctcctgctggttttgtttcctttttctaagcagtcaccgcgtggctttccctgtgctgctctgggatgggccctcctgggctacactgcctggctctccctgttctgtctgctcctctgtccccttggcagggggtggcagggagcctgggacctagggcccagtggagggacgggggtacagaggacacagacaagggagtttgggatgatgggggtggagggggtggatgccccagtgtggccctgtttggggccagcccccagctggccaagtcmggattggacccaaggatcctcaagataccccccttctgacctcctgtgcccatctgtccctccatggcagcctgcccgtctgcagggcccagkctcctcggggcagggtggcaggcagggtggggctggatggaggcggcccagccctgtaatcactggccacagctattctgagcctctctctggtacctgctcccttttcccttctacccactggcccctgggggctgttatggtacccactttccagcaggctgtggtctggccaggaaatgagaggccttatgcaagggctggygtttccggaaggctgggagcctccgagtagcagggccctggggcrgagacaggcctgggtcggcttctcagtcactgcaactgcccctccaccccctgcccacagaacacaggctgctgagcaccagttcttcctcagtccccagccacagttcccaggaaagggacacgtctcatctgcaacacggcgagaaggcctggcctcctctcatgggttgcctggccctgccctgcctggtgtggcaccagcggagctccccatggttgctgctagactcaggccacacccagcctgggtctccctgcaccagcatgaccagccaacattgctgccctctcctgtcagctccttttctgatgacggtgtcgttcctgggacatgtccggcagttcagatctctgactctgtctggagacgcaaggtcaaatgctgggctggtcagtggcctggagacacaggtggccctgaacctcctcagcctcctctgcatgccctggccactggagtctggcccttgttcctgggccttacaggatgtggcctgggcgcagagggggcctgaggcaggcagggggcagcaggaccctggacagtgggcttcagktacacgcagcagggttctggacaatgggctttagggttctggaggccagtgcmagkcccgtccagctgccatctattccttccacgaacctctgtttattcagcacagaccatattctgcctgccaggcactgcgctggcgcagctggtgtcaaagcacgctcccagaccagcagccgcagcctcacctggagctgctggaaatgcagattcttgggccccaccccccaacctactggaccagaaactctagaggtggggcccgggattcttgagtttaatgggccccacacaagctgaagtttgggaatgactgccctaggtcagtttgccaaaagacctgttcctcagatttcccaagtttactggcgtgccagaagtttgtctcaagtgaatagattcttcttagcgacatttatagactcttcatttggttgaaggccaaggatcacagaagcatttatccttcttttctcacatgtacctgaattcttgaacatattcttcttatgaatattcaatgttcttatgaactcttacggacatattaagacagccatttcacataaatggaatcgtgtcttagctggccttttatgtctggctcctttcactkaacataacgtttacaaggttcagccacacggaagcatgagccaattcttcattccttttatggccaattaatagcccatgttatggatataccacatttttattatccattcatcagctgatggatttgggttgtttccattttggggctatcatgaataatgctgatgggaacatttgtgaacaagtttttgtgtgaacaagttttcagttctaggaacatacttaggagaggaattgctgggttgcatggtaattctaagcttagctttttaagaaaccrccaaactgttttccctcatggatgcaccactttacatccccaccagcaatatatgagggctccaatttctccacatccttgttatttactgtctttttaaataaccatcctcatggtgttgatttctatttcactaatggctagtgatgttgcgcaccttttcatgtgcttattgcygtaggtatatctttggagaaatgtctattcagattctttgcccatttaaaaaattgagttgtcttttgttgttccattgtaagagttctccatacgttgtgggtactagttccttaccagagagataatttgcaaatattttctcccaactacggattgtcatttcaccttcttgatagtgtgctttgaagcacaaatgttttttaatattgatgtagttcaatttatctattttttaaaattttgttgttttgtgcttttggtgtcatatctaatacatcatcacctaatccaaggtcatggagatttatgtcrgtgttttcacttaagagtttcatagttttaacttcaatgtttggggctatgatccattttgagttagtttttgtatgtggtatgaagatggggtacaacttcattcttttgcatgtgaatatctcatgctgtctcagcaccacttattgtagactgtcctttccccattgaattgtcttggctccctcatcaataatcaactgaccacaaatgtaagggtttgttgctgaactttsagtgctatttcattcatctatatgtctctcctagccagcaccacacagtcttgattattgtggctgtatagtaaagttgtggtatcaggaaatgtgaatcctctaactttgttcttttttgagattcttttggatattctgaatcccttcactttccacaagaatttaaagatcagctgtcaattttggcagaaaaaggcagctgggattttgacaggaatttcaaagaatctgtagatgactttggggagtactgccatcttcacaacattaagtattccaatccacaaacctgaaatgtctttccgttcatttgggtctttaatttctttcaacgatgtctcatggttttcagtggacaggtcttatacttcctttgttaccaacttcttctttattactttattaattttgatgttgtttgattattcwttgctagtatatagaatataattgacttttgtatattaatcttgcatcgtgcaaccttgctgaacccatttattagctcttacagtttgtgaattctttagggttttctatatatatatacggttatgtcatctatgaatagacaaagttttacttattactttccaacctggatgccttttatttattttccctgcccaattaccctggataaaacctccagtataattaatagaactggcaaaagcaggcactcttgccttgctcctgatcttagggagaaagcttccagtctttcactattaagttatctgagggtttttcgttgatgccctttatcagtttggcaaagtttccttctattcttaagctgtttagtgtgttttgtcatgaagaagggtattggattttgtcctatgctttttctgcatttattgatgagcatgtgggcttttttcttgattctattaatacagtgtattacattgattgatttgtgtatatttagccaatcttgcattcctgggatccatcctacttggtcatggtgtataaactttttcataggatgttatttttggtttgcccatattttttgagaactttgcacttatattcataaggkacatggctctgtagttcccttttcttgtgatgtctttgtctggtttggtcatctagataatactggccttatgtaatgagttgggaagtgttctctcctcttctgttttttgaaagagtttatgaaagattggtgttaatkctttaaacatttagtaaaatttaccagtgaagccatctgatcctgggcttttgtttgtgggaatttttttttattactaattcaacatcttgacttgttatgggtctgctgagattttatatttcttcttgagtcaatttcaagaatttctgtctttctaggaatttgtctatttcttgtatgttttctcatttgttgggctacaattgttcagagttctcttgtaatcctttcttgtttctttaaggtcagtagtaacatcccctctttctttcctgtttttagtaatttgagtcttttctattttctcctaggtcagtctagcaaaagtcttgccagtttttgagatcttttcaaagatcgcctaacaccttattagtttattaatatgcataatcatatttctgaaaatgggatccagaagcatatgatcatatataggctatattactgagaacatattaatattaattgactatgcataaaaagatattccttaaaacagattttgagtaaaggaatacayttataggtaaacggatttttacttataatagttctaggaaaactgagcagtgcagcaaggagacagacagacagacagacagcatccctgtcctcatctgggagacagacagacagcatccctgtccccacccaggagacagacagacagcatccttgtcctcagctagcagaaaaacagacagcatccctgtcctcagccaggagaaaaacagacagcatccctgtcctcagccaggagagagacacacacagagagcatctctgtcctcagctgggagacagacacacagacagcatccctgtcctcagccgggagacagatagacagcattgctgtcctcagccgggagacagatagacagcattgctgtcctcagccgggagacagacagacagacagcatccctgtccccacccaggagacagacagacagcatccctgtcctcagccaggagaaaaacagacagcatccctgtcctcagccaggagacagacatacacagagagcatccctgtcctcagctgggagacagacacacagacagcatccctgtccccagccgggagacagaccagcatccctgtccccagccgggagacagacagacagcatccctgtccccagccgggagacagacagcatccctgtccccagccgggagacagacagacagcatcgctgtccccagccggtagacagacagcatccctgtcctcagctgggagacagacagacagcatcactgtcctcagctggagaaagacagacagcatcgctgtcctcagccaggagacagacagacagcatccctgtcctcagccgggagacacacagacagcatcgctgtccccagctggtagacagacagacagcatccctgtcctcaaccgggagacagacagacagcatccctgtcctcagccgggagacagacagacagtatcgctgtcctcagccgggagacacacagacagtatcgctgtcctcagccgggagacacacagacagcatccctgtcctcagccgggagacagacagacagcatcgctttcctcggccgggagacagacagacagacagcatcactttcctcagtcgggagacagccggacagcatcacttttctcagccaggagacagacagacagcatcactgtcctcagctggagacagacagacagcatccctcttctcatctggagatagctaaacctgcttccatgtgaagtagcatattccctgatggggaagcactgctgtcacaggcatccacagtgggtcacccagcctagcaaggtggcactgagaggctacagcccactgtgccatctccactgttgcccaaacctttctagctgcccatacacaggatctgagggtgctgggcagccagccagcctggtgaaccccacaagggttggggcatgaggccagggcagatggcagtgggtgagtttgggtgatctggcctttcctagagggttggtgggctgggtatcaccttcccacttgtcccctcttgcctagtaccctccaactttggagggtaggacatgggagcaggaatgacacaagatactaccctgatgtaattctgccccattagtaccccctgccatcccccactccaccaagcccctaggaggtaggcaagatccgggaaggaaattgagtgccagaggtgggtcaaatgtgcctagatgggttggccaaacccccaggtccatgcaagtccctctgatatggtggcgacatctctctccttatgcccacagcatttggaaacagagccctgggctccagctggcttggtggggagaagagaagccccctgcagaagctctatgacctggatcaggtaggtggacagaccctcgacccaggcatgcccccctccatcccagccaggagcctgacagcaacagtgcagacctgctggcatgagactggaccccacactggggcacagaagggcatcctccccaaaccaggctttgtcagagagcagtgacaagggcaaatcttgggggtaagatgagagacctggagtctctacccacctatcttcccatccatcaacaatctgaggccaggcatagttctttgtgttgcagataaaaaagagtcaaaacagaccctgtacctgccctcaggaagtttacagtctcgtgggagactaaatctcagtgtgtgctgcagtggggaggtgtgcagggacccccagccccggcgtgattctcaaacagatggaccaggcggggctggctggcccacacacctaacttcagctgggggcctgcagggaccacacacaaccccaaatacacacatacaactgtaccccaccaccaagaaccccacactctggctctctctctctctttctcacacacacacacaaacacacacacacacacacacacacacaccccacacacacaagtacttattcggacagcacatattgagcacctactgcatgcaggctgtggtcaggatgctgagatccagcagcaagcaggttggccaggtccctcccstagtgkagccaccagtccagcaggggaagatgtcatctgatcaccacccacactaatacttaactaattctgctctaaaggggagtatgaggtgcaacaagagctctcctgagaggatcctagtttagatgggggagagcaactcctctccaaggtagggacattgaagctgaggtgaagagcaagagtcaataggcagacaggaagggccaagcgccacaggcagaggaaacagctgtgccaaaggcctggcggggagtggaggacaggagagggagcacaaggggagcctggagaagtgggcagcacgcaggccctgcaggtgtgcaagggtagcrgggagccatgcaaggttttaagcaaggaaggacagcatcagattttcacccttggggtatccctactgctgtgtagagaaggatcagggtggtgttgggtaggtggctgctccccaaatcctgagggctgagcggaaggggcctgtggagctcatctggcccaagcctacaagcaggtagggaggccttccttcgcagagtgtgactgactgactctgggccacacagcaggctgacggtaggacaggcactcagtagggccctgggttccactagctctggcggcttctgaggggcagatggcccctcacagcctgaggaccctgtgaccgttgggtgtcaactccctggaggcttagcaccttgcggctggagaaataacatagtaaaaaccatctggccaacaagtgctgatcacgtgccaggccctttagttctgtggactaattacgtcaacccataaggtggggccgttgtccctgtttacagacaaggacacaggcatggggaggcaagtgccctgcaaaggtcacagagcttctatggactagagccagcraggaatccaggcagccacactgtgggggtgaggacaggagctgtaggtgcagccccggacagtggacataggtccagctttagagtcccaaggggcctgagttggagccccggcttccccaaagagagctgtgtgacctcaggcaactcatttcccctgagtctcagttttctcttctgtaaaatgggtattcatgtgcctatgagcaacagcagtggcagcccaagctgcttccagccatgaggagagttagtgcccattcctgagctgctcggagactggcagcccacggttcagcagcagccagctgcccaccatcgtcctccggatgttgacttctgtcatagagctggcctcctgactataagaggactgccagggctgcagacayctcacaggagggcatcccaggcagaaagtgagtggtggggtaagggtttcccctgacttttcaccctaarggagtctttcctgggagtcatctggctaatcccctgatatcgcctcaggcagagccaggccacattccccccgaacccccggacccagtgcttcagcaacgacacacgaagctgaagatmtggctccctgaagctgggctcatgccctgacacagccggggtcggccagcaaggaaggaggaagactgacaggtggccggatggccaacattccctgccacaagaaatgtgttgggtcatctaaaagctgaaagcagaccttggctgtgggccccgggggcacagcctctcctggcaccatgtggagctaggcttctaaggtcagtcctgacggtggaaacagggtctcccaggtgtccccatacccccayggcatagctgaacctggcagccttcccatggtgagtgtggctaagtgactgtcttatttcacttagcatgatgtcctcagggttcactgtttctcaaaatggtgagattttaaaaatgtaagcacatgacatggcatttgacactacagaagggtagacacagtgaagagtaggtctccttgtccagcacctgtcctctcggaggccaccagatccctgggtgtccttccagacatgctctaggcgtgtaagtagtatccactgstttgccgtgtgcttacagtaacttcttgagaatctcacctacargcatgtatgtcctatgtctgtctgcctctgtcttttcattttgaaaaattcaagcatatgcaagaagaagggagaatagttcaaggaacccccaccttcccaccacctaytcccacctgggatgactgygaagccagtcccagccttgtggattctgtgactatgtctgaacgtatctctaaaataataagtctccctccacccaccctttgtgaaacgttttttatttctttccctttttcaacataaatgttaagccctgttctgcactttggttttcccacttagtgtatcttagacagctgtgggatagtttgaaaggcatcaggagcatagtgtgcacatgtgtgcaggagcgtacatggacacacacacaaccacaaacacaccacacacactgcacacacacacacatatgtaccccacaccacacacaccccacacaccccacaccatgcacacaccacacacaccgcacacacactgcacacacacacacatatgtaccccacaccacacacaccccacacactccacaccacacacacagcacacacacaccccacacaccacacacaccccacactatacacacagcacatacaccacagacaccacacacacaccacacacatatgccacacacaccccccacaccacacacacaccccacaccacacactccacaccacacacacagcacacacacaccacacaccacagacaccacaccacacaccacaaacacacataccacacacacaccacacacatcacacacacacaccccacaccacacacacacacaaacacacaccacacatacaccatacatacaccacacacaccacacacccgccacacatgccacacctgccacacatgccacacacacacaaatgccacacacgcatgacacacacacacaaatgccacacacgcatgccacacacacgcacaccacacaccacacagagacatcatgcaccacaggcacacaccacacgcgtgcaccacacacgcacacgacacacacgcattcccaccccactggcgtcagaccctcccaagcaggccctggctctggtgttcctccaaaggccgctttggcctcctctgaaatggaaacacctgaagccttttttcttaactgagaactcacataccatacaactctttcaaaccctacaattggtttgcagcatttttataaggttttgtaactatcaccgctgtctaatttccaaacattgtgatcaccctcaaaagcagcccagtgtcagtccatcagcagcccagtgtccatcagcagcccagtgtctatcagcagtcctccacagttcactcaggttctagttttggtctctctggatgtgactgctctagggacctcactaagtgggactgtttggcactcgtccttttgtgactgtactattcgcttggcataacrccctccaggtcagcccatgtggcagcatgtgtcagcaccgcattcctttcatggctgagtcatattccattgcatggatggccgcatacatttgcccactcagcagtgcacacttggattttctggctaatgtgaatattggtgctatgaacttcatggacaagttttttgcatgatgcacgtttttagttctcttgagaatatgcctaggaccggaattgctgagtcacatgtttactggttttgaggaactgccaaactgctttccacagcaacggcacccctttacactcccaccagcaactcgtgaaagctccagtttctccacatcctcaccaattcctaattgtctttttaattatatcctgaaggctcttaatgtaattttaagaagttaaaacactttcttttatgaactcttacacaaaaaatcataggcaggggtgttaatcttggagataagaaccccgggtggggcaggagtgatctgaagaaaggggagctggaagcatggaagcgctggcctgggtctctacatggctgaggctgcgaggggctccggacctaattcggagagcggtgaggctgctggcccgcagcaggtgctaggttaaagccagtcgttgttccttctcataggagggacaggctcagaaggggcaggcttcctgtcccagcgctgagataagaatttgctgggggaataaaaggagtgaaggtgcaaaggagagtgctgattggtaagtacagaatcagcccatttattattgagccaaagcagcccgacagcccayaagcggctgcagttttcaattgggtgtggaattaaacagcgctgcttcttatgcagcctcctgcttttagtaaacattgaagagtccatgtgtgcccgtactcacacggagcgcactctgatgccacaattccttatcactcctcctctgagtgccccacggcatacatacccagcgcgtccttctcccagcctcagcaaagtcagaatccgtttctcccaaatctcggcccaggacagatgcccgggccctaaaccacacagtgatcagtgacagccctggggttcgaatttgggtgcccggcgcagctcctgctcccaattcccgggcgcatcccgccggggcagcgccagagtcagggagcccgcgctgccctgacgcgtccccctgtcccgtctcctgtcgcccacaggacccgcgctcgaccctggcgaaggtgcaccgkcagcggcgcgacctgctgaacagcgcctgtagccgccactcacgccggcagcgcctgctacagccggaggacctgcggcacgtgctggtggacgacgcgcatggcctgctctactgctacgtgcccaaggtggcctgcaccaactggaagcgcgtgctgctggcgctgagcggccaagcccgcggcgacccgcgcgccatctccgcgcaagaggcgcacgcgyctggccgcctgccctcactggccgayttcagccccgccgagatcaaccggcgcctgcgcgcctacttggccttcctgttcgtgcgggagcccttcgagcgcctggcatcggcttaccgcaacaagctcgcgcgcccctacagcgccgccttccagaggcgctayggtgcacgcatcgttcagcgcctgcggccgcgcgcgctccccgacgcccgggcccgcggccacgacgtgcgcttcgcggagttcctggcctacctgctggacccgcgcacgcggcgtgaggagcccttcaacgagcactgggagcgcgcgcacgcgctctgccacccgtgtcgcctccgctacgacgtcgtgggcaagttcgagacrctggyggaggacgcggccttcgtgctgggcctggcgggcgcatccgacctgagcttccctgggccgccgcggccccggggagccgccgcctcccgcgacctggcagcgcgcctcttccgggacatcagccccttctaccagcrgcgcctcttcgacctctacaagatggacttcctgcttttcaactactccgccccctcctacctgcggctgctctagcggtcctggaggtcctgtggccacgcggggcaagtgcctttccgacaagacccccggggaatgcaggtgctgccggccccaggacccctcttcaagagccactgcgtgcactcacctggccgccgggccagcgggcgcagggcacacctggccaggcttgggggcagcccatctcaggtggccctgcacgcgtgtgcctgcctcggcctgtcgcctgaggcctgcttcctccacttgctccagctgacaggcacctctccaggccccgtagatgggcaaggacttgataaccagggttttaggcttttaaaggccattttgggggtcagccctgcccctgaacctgttcatggtgcatcagaacataatgctgacaccggtgtcagtgtggcccgagcctgtgtcctccccacctcgcccaccctggcaaggacagctgcggccaaggacgaaagccctcccttggctggcctcacgatggggccgtcccgggagccaggtgggagctgccttccactgccatcgggtctcctctcctctcccacgcggctggccctacccaggcgccaccttcggtctcagtctggcaagacgctgggtcttcaggctccatgccaacagagcccctggtgcaatgcggtcacaggttttatgggactttggtgagctgsgcggtcatggttttgaaataaatgtattttgttactttctgattttttggagtttatctgcttcattgggccattttctctgggagactgcagctgtctgatctcaaaccactccgtctccaagcctttgtttccctgttgccaagtggcataagaagatcagatgagagtgcccacagagcctgggtacctcccagtggtgcatataggagtgaggggctacatggggcataaggtgaagagagtgcactgtgtaggaggtgctaaattctggcactgacaacttggggaaaatctactctttcaccctgacctgggccaaggactgaagcccacaccagctcagccaagccctgggccttgtgctgcctcccacctttgtgcgtgtgtgactgtgagagtgtgcatgagtgtgtgagtatatgagtgagagtgtgcataagtgagtatatgagtgtaagagtgtgcatgtgtgcatgagtgtgtgagaggaattgtgtgtatgtgtatgtgtgaatgtgtgagtgtgggtgtgtcttgggccacttgtctctgagctcccccagggctgtgtccagaggccctgccagcaggaatggggtggccaactccagtggacctgggaaggggctgcagctgccactggtttccccatgaggcctcccccagcctgggcccttcccccactggagggacatacaaagcccagggccttgcaccatttccagcgttccctgggtgctatggtttgaatatttgtcccctccaaaactcatgttgaaatttaatccacaatgtggcagtcttgagagatgacccaaccattaagacgtgactgggtcatgagagctcttccctcacggatcaattaatccattggtagtttactggattgatgggttgatggattaatgagtcaccatgggagtgggaccggtggctttataagaagagtaaatcagacctgaggtagtgtactcagccccctcaccacgtgatgctctgtaccacctccggactgtccagagcccctgtcagcaagaaggccctcaccagatgcagtccctaacgctgggacttttcagcctccataactgtaaaaagtaaatttcttttctttataaattacccagtttcaggagctctgttacaagtaacagaaaagggactaaggtactgggccagagccccactgtttagagacaggctgaggagggaaggatggggccttggccacactggggccactgtctttgtgaggggctccctggccctcacatgctcccttagaggccacacatgctgtgttctaggccactgtgtgtgcaattgttgcacacccattttgatgacacatgcctttgttcccagctcactcagctcccacacagcccccgatgggacctgtttgctgaaactgacacccatctggatgtctcactcccaggtgtctcacaattagatgtgccctgcctcctgctgtcatgccctcagcacctggacatgctggcagttatcacactcacagtcccttgtgtgggcagctactccactgcttccccactgatgcccccatgtgtacatgctgcaggcacccagtgtcacccagacgctgtgcccaccacatgcagctctgtaccctctgctgtatgtgcagggccacagcccaggccctcgaggactgagggcgctggggcagctctggaggctgtccttggggaactccacctgctctggcctgctgtggcctgtttcctctctggctggtgccagaacgtctgtgtcctcacagatcacaggctgaccaccctgtgggatcccagctggatcactagaggatccaagaaagacagggtcacatgtgcagagctggacaacacaggggggtgcccaggtgattctccatctggcacctccttcaggcaagtgattgttaaaaccatagtccagtgcccacaagggctgatggcacaaacccaaggtcacgcggcattttaacttccttgaaattgtcttttacttcccaggttttcagtctcttaaagttggatagtgctggcaggacacctcccaggatggggtgccattgctggtttgggttacagacttctttaaaataagtgtaagtgctcttttgcttttttctggctttcattgtcaggaaaatgttaaccaactttctgcagttatggggtagggcttgtttttcttttcagttttattctgtggctttgtcattcaggcagcttcctgagagggatgtttccaatgcttaaaatttaaaataaatccctggtttctcacaaacagcgagatgtaatgcattattgttttggaagcacagccgaatgcatctgtgggcttcagcaacgagtaagacagtagcagggtgaaggcaaggcccagggctgctgcatgcagctccaaatgtgtgtcaccagcacactccaaggggtcagtgggcccagatctcaggatgccacctttccccatcatgctgtggctcctgcatgaagataaaggtgcggctgcctgggacaaaggcttgatgacagtcgtttaaggtgttttctgttatccagaggaagggggctgagggctggtgggacagatgctccaatgggccacttggagcccaggacccttctcttttgttgctccctagtccctagggcctggcccttttccatgagagtgagccattcacttttcaagtatcccaatgtcaaagggaaaagaagggcacccaagctggctttaaagacacaaactggacagtccattccatttccagtgcaatgccattggcctgaacctagcccactgtattcccagtggcaagggagtctgggaactgacagccagttttaggtcgggtgcctcaatgcgctccctagcatctgcaaccctcccgcagtctccctctgaccaccaggcctcttggcctgggcacaagaaggctgggtgtgcaggagttagtgccccctggaagcagtcctcacctacatctgttggaagtcgggcgataaatgctccagcttttatccctgcatgaaggacattgagacacaatctgcatggtgccccagatttccccacggggactgggcaccaaatgccctcagtggctgctgtggactgaattatgttctccccagtcttatgtggaagccctcacccacaatgtgatgctatttggcgatggggcctttgggaggtgatcaggttgagatgaggtcatgaggatgcggtctccatggtgggattagtgtcctcataagcagagccactggagagttctctctctctccctccccgcctctccctctcacacagggagaaagcagccatctacaagcccagaagagagaagagagcccccatcagggaaccaaggcagctagcactttcaccttggacgtccagccttccttggaactgggagaaaatgaacattgtttaactccccccagcctgtggtgtttgctacggtggtcccagcagactaagccgtggttgccagctcaagggtacattccttgtctggttccgtcccttccctgtctcctccctacttctctatgggctaactgggattgcctctcacaaaaaccactcacactccatccttgcctccagagctggttctgcgggactgaggcaaagagggaatcaaccataaatccatgatgacatgctgcttttgttccactggtcttaaatgctaggttagtttggatccttttctgtggcagtgccgacatgaatgttgttgcataccctcctcctgcataggtgtgagtgtgactgcaggataaactcctgggagagggtccacactccccaatgcacctccaccgtgcctcatcctttctacctgtggatctgtgtttgactgtaactgctcacagcttaagggcacatggggacccagatggcctcagagatgcagggcacagggcccatgttgctatctgggccactgtgtgagcatttctaaagtttatggagtagctgtgcttagagagtattgctgcaccatctctctcctgtcaaacatttcagctgtcacccgctcctctgcaagggcttccatgcggtgcagcttcctgggggctcattttcttctttgcaggaataacatgcacataaacctaaactcagtgcacaaggcaggggctgcaaacacatcccagctgccctcagattcttcctttaaacgcccaggagaggaggcacgaattacagaccatgtatgtttttataattgactctggattcaggtaatgagttaccaactttttctacaaaccaccaccagctttgctatcatgagtggaagagcaggcagccagcgacccctcctgctccagtcccaaaagctctgggccctgcctatagtgcaggtgtggaccagagggaacctggagaggctgggaactctctggaaattgttctggcaagagctgataaaggaggtgctcaggagccctccaaccaaccaaccagcaaatcctatcatgggtgggggaggggagacagtacaccccaggggacagggacaggaatgcctagagcagcagcacccacagtagcacaaagtggaaacaacccagacatctacccaaaagagaatggacacatcatggaatgagaaacagtggaaaatgaaggaactacagcagtagcatcatcatcacatgactcttagcaacttgctgtggaggggaaaaagttgcagagtttgacacagtcttatataattgaaaaaagcaaacaatgtgttatttcaaggagtgcagtggtgcgatctcagctcactgcaacctccacctcttgggttcaagccattctcctgcctcagcctcctgagtagctggcatcacaggcgtgtgccaccatgcccagctaatttttgtatttttagtagagacggggtttcaccatgttgcccaggctggtctcgaactcctgggctcaagtgatccacctgccttcagcctcccaaagtgttgggattacaggcgtaagccaccatgtctggccaaattataacattttttaagtggggagaaagatgtggtgacctgatgggcagggtacgagggactcagggtgtggtgaagtgggggaaggagcacccagcagggataagagtgggtctcgtgtccctggttatgctgcatggtaaacatgcgttgctgtattttgcttatatcaaacagtgcatagcttaaacctcagagacaacctcctcgaagcttatacagtccaaatgaagatcagcctggctcccaccctcacaggaggggaccccagggatctttgcttcctgcaggtctgtgggtgctgctggaagctgtactctatccccaggcaaatgctgtgagtcccctgcctggacctggggtcccacctggggagggagcctggagtcttggctggggcggcacagtgcagcccggtcacccttccccaaacaccacagatgtgactccagggtctgcttcgtgcaggttgggaacccacccctgtcctgcccccagggcctgggaagccaacccccttcaatcttttcatcacaagggtcctcacttcacttcctttctgagacaataaagccacttgcccacctggggagaagacaataaagccacatcccactccagggagaaggctgcaaagtgtcctgattttattcaccctcccaaggaactccaaggtgactttctagcccctgtatttgtagaacacagtggggggacccttaaatcttcagcagacaccccgctgcccagtgctgctgtcttgctttacaaaggcatcaccagcctccagcagccacaccacgctccttacattactgatgttgtaatacaggaatatggcattaggctcatgtatgacaacccacaaaatggtgtgcctcactctcggtcccgtccccaggtcccccattctcctcctcaaaggtaatgattgctgcctgctcctcatccaccgccctcccccccacacacacacatacacacaccgtttt

SEQ ID NO: 93507 - DNA, 34014 bp, Homo sapiens
tttgttcaggttaacatagactaaccctgactattatcaacatgtggaatgttgcattgttcccaaggtcttataattatactccagaggacattatatttcaagggacacgttcagagaagtaaacaaagaagaggcctaagggaaacaatcatcttctttcaacatttcctgagctttcaacaactcaatttctttcacatattaagttatataccactcaagggcactatcattttaatgaatttttctctttgattcttcatctgagaatatttattaaaagctctcaggaatttaaaggtaaktttaatttgactacatttcttccatacgtactttggttgtgagtcttttaggaataatcatgctaatctagaatattgaactcatatacaaaatttaaaccagattcaggaaatattaaaacatgtttatttgatttttccccttcaaagtgtgctccataatcacatatattcacaaatcacatatttcagaagttacaaagaactgtatattaatcaagttaaaatgtatttcataatggttttcacacatgaaataaggttcaaaatgtataatttctcccatcagaaatgattgcaaattaaattttacattttatataattaggtaaaatatgtgagtactaaaggacaaatattattaaaacaaattggtagtgtgattcagcttttctaagttatttaatatgctctttagtatatacctcacatatgagtatacactctcatatatttataatgtacttcattgtatgagatattgagccaaatatgatactgttttcctatcttttcaatctagagtactcttctgtaccttcatttaaccaaatttcatggtcaaaagcctttattatagctttgccaaccacctcaccatagtttggcacttctcttatgtaaccttgtatttttttgtcttttcaatgtttacaacacagtatagaatagtaattaagattgcaggccttggagtcaaactatctgggttccaatccaatctactctgccacttgttgacagagtagccttaaaattggattataaaactaaacctagtagattcttaaatgaagattaaaaatataatatatgcactgttgtgtttgttttgaataatcatttagaatatcataatttcattctgagtgggactctgtctatctttttttaaatttggtcttgaggtctctctcaggagaatggctataaaatttagctgtgccctattggggctccagagtatttggatgtggatgtttacaatgtgcttttcacaggatacttctttattctggtggacaatctaatgcttaaggatctgatctgagaccaggtgtctctctcataggaaatttgtttacactggcagacaatcctgtggctcttatctgatcaatgtcaagtttattcctaccaagataaccattatctgtgaaagctctgactaggaaagaagttagacttgggtgtgtcaatcagacagacacagagtagcaaatcaacaaaacacataaaataactgaggtagtttattacttacagatccaaagagaagagggcagtatgccccgcacagcaccaaagggaaggagggagctgtccaggacacttgtgttcagtctgcaagtggggagcaagggagagaaagagggagggagttgtggccaaatcctttagtggggttcagagatttacccaagcaggtttcccacaggaagttttaattggtgggttcatggcaagcaagagcaagtttcatgtgcacactgtgactgagagatggtccctgcagcatatctgtgcagtccatgtagggtgtgcacattagtggggtgagtaagtaggttgtctcttgctgtcccatagggaggtggtcaccacactgagggactgaggggggcagagaattggaaactgtgtcaagggtgcctactgcttctggtatgataaagtgtggcttatattcaaatggatgcagaagaaacgtaaaattataagaattcactacacctactaatacttctcagtatatcctaaagtggtaacttaatgatcaaaattattatacaatggtaaacataaataacttaattcctgatagttttacctagtgtactagagaaatttcatttcatttcaatatacatttatttacctcaagtataggtcttggaattagaaagtcaaatatatgtcccaatcctaagacaagaaatctaaactctaattggagaaacagattaaataagtaataataacacagtggaatatatgaaataatagcatcatattcaagatatggaaatggagaaaagagaataactcattttgtctgtggaccactggaaagactattcagaggatgtgacttgtaaaagatatttgagaaatgaataggagttttctaggtagacaaagaaattaagggtcttagcttgaaaaatgagacatgcaagtgcaacagcttagtgtgagggggacggatctatgcttaaaaaagaaatatatatatatatacacatatatatatatacatatatatatatatacatatatatatatatatatatatacacacatatatatatatatggccttcttgctgaaggctaaagcctaactgtgctagagggaaacagggaaagtcggagaagtttgaatgtaaaatccgtggtaaagatctttaaactttatcatttagatgatggtgttgtggtcaggttttaggaagatctcattgatctcaatcaatggagaaggggaggaactaaacttgagaataggaggactaattttaagacctttgccatagtacaagataggtaatagtaaggaaataaattagggcaggttatttttggcaataataatgataatattaataatggctaccatttattatgttttatcaacatacacactgaacccattatcttatttcttcatcacaagagttctataaagtaaattattacttccattttaagattaggaaaatgaaacctaggttcatgatttgtccagaatcacattggttagcagacctaacatatgaactctgaacctagagaccttacagtcttaaccactaagccacttcatgaagaaaagttgctattctgaaggatacttagaagataaagcaactagatttgtgaatcaattgaatatgcaagattctaaaattattcccatatttctgagttgtgcaatagggtaaatatagtttcactaaaatattaagtacacaggaatctgggacaagaactggttcagtggagagtaaggctaacaggttaaatttatgttattgaatttgaaatgcccagggaatttctagaggaaaatgggcaagagtagctggctccataggtctggaactcaggccataaaataaaactaaagataaatctgcattcttgaggcatcagcttatagatgcttgttaaaaccatggggaagtgtgtaaagtaagataaaagagccaagtatggagctccaaggaagaataacatttctggcctaaataaaatagaaatactcctttgggaaattgagaatgcggtaacacggaaatcaagagaagagagttccaaggaaaatacatggtcgaaaatatcaaataccatataaaaataaagacacatatggattttactgtttatactgtgtttcaacattgaaagggcattgggagtttatgagaaaaatcacgtttctttatttacattcatcccctcttaaccctttctcacatttccttagcagtcacatcatatcatttctctgttcacaatcttaagtagcccttagaagccccaaattcacaactgtctacaatggaaataattttttagtcatatctttgattacccaccagaaagcaaattttatgtaggcaaaatcttttctgtcttatgccagagcaatcgttggcacatagttggcacttaatagatattattaacgttatcaatgaatgaatgagctacactcctaattatgtagtaagctccagtcaatatgacctactcactctacactggacatttttttcacacttttcttctcctttacctttgttcatgcattgcacacttacacgaatgatcatagtgtctatgctcaggaaattccttccaatctctgacacctgatctcaaatgctatcacaattcttcaggtttctcatagtttccccaattagatgttctccttctttgaatttttatcattgtatccttctattttgtgagacttgaatccatttagctttctcatataaacatttttatttttaagaattgcacatttattgagatcagatcttacaaaaataagcaatagctgtgtatgcattgcacatggtagatgcttcaataactattgaccataatacatagaaaattatatttaaagctttcaatgaaatgaatgtactgatcagtgtgtcttatatatacgtatgcacactttaatatgtaattgcaatataaatgtactgtgatatgatctcttgaaaaatcatctgatatatctgactatatttcatctgtagggtttagattttttagcatcataatgtagatcataaccagactttcattatggctaacccacgattttgagttcaaaaatagtcacaaattcatagaaaaatagatttggaagggctctaggtcagaatatatttcaatctcttattttataaatgaagaaattgagaagcaagaggtttttcgtgtttctttcctctctttaacttttacacaaggtattcattatctctccaagacttcacttaccttaaacttgtttctttaaccttaaccttttgtcattaatttctttgctagaccctgccccaccccaatgcgcattttctctcacacttgtggtctgttatagataatttagatagaataattcattggtccacctataatttaagggagggaagtattgattaggccacccttgattttatagttaagaagatccgtgcagttacagaacttgtttaagttcccgctgcaatgaattgatgttgttcccggaccaaactgagggtcgagatgcttattctcatggcccaataaccagatgcagataaactgagagagaagggagtttttatttctgtaaccgattacagggagaaggtctggagattattgccagatcgactcaaaatcacagtttttccagagcttatacaccttctaagctacatgtctacatgtaagtgcgaatttatctcaaggcataagtgattaacttcttttaatctataactaagatctgagtcctgaagacgttcctttgcagtctcagtaaatttacttaatctaaatgggtcccggtgcttgggtgattatccttgtctcttgctaaatcatggaggtttagggagttccttcagacccccaataaacttgtttgtgaaggcctgagggctttctttcagacccccaataaagcttgtttaatcttaaatgggtcctgttaagaatgccttccttatcttgtcatgcttcaaggcccaggaaaggcctagccaaaactcttggtaggcttttgttacattccagcctttgtataagggcactgcctctatgaacttttaatatctaaattaaccactcagtcagtgctgaaacagttgttatggaggcctgtgttagcaatacctgcctgacacaatggcactgcaattaaggcacttttcacctgactccaaagttcagtaaatttattatgtatctcagaaaattttgcctgaggaaatgctataaaagtaattttgccaataaaaagtgctagccttatgtaataaatgaacagtacaaaatccatagtattaaaatctaatgctgctggagctagagtgatgataatactactaaaatattaacctattgtttgatttgattgatactacactttggtcaatatctagtttcctcaaaatggacaatgagcagcgtgtcttcagaagggagttrgtggatgttcaggggattccccttttctagagcattgctgaagagtggtttcaagtagaattgtytgagscctgaccagatgatattctgatctctacctatcccaaatctggaagacaytttcatttgtttgtactcaatgatttgatagtgatccatatgtgtaaacccactgatttacagattattagtcaggtctaacttgaaattattaaacattttttgaggaaaccctgtggtggttgctgtgagagtgtcatcttaagttagactaatttacttcctattctgaaaggytaccaattgaataaagaatatatctgagagaaaaattaatgtygttttcttgtttttctttttaaattcaaatagaaattattaaaactgtatatatatawgttttggatacattagaatatgtatattccattatatacacacacatatcagatatattggaatatacatattctatacattttgatatttaaatattttgtttgtatatttaaacaactgctgatttcagtatacaatctcagaaaaacttaagatgacttattaagaatcaacaatttttatttctccatatctgctatgacagaatcttctgatttacccagtgatagtcgtgcagagatatatcacagatgaggctctttctagccttttgttcagttaaattaatttagtccacaattaatcaactgtcccataattaccaaaccccctaaaggcaaatttcctttatattcctatttaatttcttaaagaaatacatttcaagtaaacatattgtgtactgattattttatattatgtatatcaaaattatcaaaaatatcaaaattattttaaagtaatgtgtaacaagtctcaggaggaaagccctgaatttgagggatgttaatctgccaaaattgtgaacctgtatgagaacaaagagcttcttctaggaagtaaacaatgcacaatacagattttggtacatgtaaaaaactaacttgttttgacaaagcatctttattttcttactacttaccttgctttctgagtagttcaccaaacccaaattgtttaagactaaaaccgcatttcatttcattgttgaaataagtgtttagagaagggaagtcagttactgagaatgtacacgtccttttgtttttgctatttttggatatattcaaaagaagaaaaccattaagataatctttgaaaggtaccattatacaaatagttcatctacaagatactcattgaagctaaactttttctagtatagtaaaagctaaaatggctacacatagtttattttttatttttattttatttttctctgtgaactctgcagagaagtatacacatagtttaacattctttttcgtaggtttttgtcattgtttcctttacacatgggtgtgaacatgtcttaaagttttaaaattattaatatattagtgccttattaacattgttacaaaaggtacaagttaactatctccttaggtgagctaaaccatgtgctattttttttctctacaaagtccacaractttttcattacaaagcatacaaaacagctaaattggtatttctttcartcagacttcaagggccrcaatttaaaactttccccaataagagataaaatgagttacattgtactttgaaatttaggtctctctccttctctctcttttaactcatgaatcgttgcttaagcctaaaccagatcaagcagcaaaatgttcaacgttggtactgatttggctcatctgttttttagtactaaatctgtgataggattggggagattgcctagtacaggtactcatgatttggggacaagaaggaggaagagttgaccacaagaaaagaccaaaaagggggcctaatgtgctgtagtatctgggtgcaatccaaatgtgtatctacatatagatcattatttaaaaatgttgtcgtgtgcatggcttaatcaaatgattaactaattaacttaatattttagttactgcctcctattatttaatttatcattatacctttggtaaagaggaagaaaatgggaacagttaaggagatacttatttcctatgtcttatatttctttttttttagcagtgcctcaataatctgactgttgaatgtacaatyaagtataccataggcacatatgatttagatacatttctcaaataactggtgagacacaatatcataatggtcagagtatcttgatccactctactcaatcagaatctattgtcttttttttgtgagtggcacactggtcactgcatggaaaattgccaagattttttcttttccttctttaccctttcaccaaatctagaacatttttacctgaaatgcaattcaattctaataaactttttgatattagtaggaaatttacaaactgatagacattgaagttggccacttcctccacccattttaccccagagagtacgttatcattactcacaacctgtctgtttaatacttcctcttttacctcctttttgggtcttatttgtatgatattttaatcacattttacacacacacaaaaattatatgtatgttcaagataaataagagcctggacaacacagtgaggcccctttcctacaaacaattaaaaagtttacctgggagtgatggtgcacaacttagtcccaactactcagaaagctgagatgggagaattgcttgagtycaggaggccaaggctacagtgagccatgattctgccactgcactccagcctgggcaacagagtgagaccctatgtcaaaaaacaaaaacaaaagatagataaggatggttcctaggaaaggggagaagaaagggagtggaaataaagaatacatttttgttttagatattgttacacaacttctctacagccactgattatcttatactmtttttgacagaaaagtttaaagttttgttaatattttctttccttagggatgacctggatcagtgaaatattggatttgatctttaacaatggggatgcagagaaatgtaaacgtgatgcaatatacaagcgagtgactttcatggaacttataattcctggactcacaaatggtatttttttaaatgtctcttttcactacaagagtaaattccccccccyttttttttaagatatctggaggagtcatgacagaaaatgacaagcttggacaattgaatcataagcatctgtaatagaggagtcagaatctgactgtgccaataatcatattatattcttcctccatccaagggtaatatatgcataagagaagattttaatgtatgtagcatgttttctttcaaagacagatggaagttttaaatgtttaattattaggtaatcattatatagacaaacttcaatatttgattcaatatagaatcatgtatactacaagttatctcatatttacaaactcaaggaaaagagatatggatatacgatcttgcattattaaattaaaaaaatagccataagcttcatggcctagttcaatcttagaattcaaatatgggagagctggaaagggattttgaaatcctctagtgcaaytttctcatatcataaatgataaacagaagaatataaatgaagaaaaattctagacattatgattcttgacctgtagctctttctrcctcatcaaggtgttctatctgaggattttatagccacttatgaagatgatagtcttatgttgctcataggcataaaagagtcttctcagagtttatcttttttaatctcagtgtagattttaagagtatatgaagtcatatagccattttaagccatatagtggggtttagaaaatcttagattatattgtaaatcatatttataattctatgtttrcatggtagtttgttaattttttgtgattgtaggtgttgagcagttgcaaaacatrcagtctcctcaattagtgaaaacacacctgcctgttcaacttctcccttcttcattttggaagaataactgtaagatagcaaattttaaagagatataattcttatttgtgttgtaaattttttttaccaattatgcagaaacacaaggtgaggggttgcaacctctagataagtaattgcaaaataataatgtggctcctatatcccacagatcaaagtaacaccagtggacaccaatgttgtagctaggggttacactcaatgcccaagcactgagaacctatcaacttttctcaacatgcctgtcattctctaaatcctttgagtcattgtcagttgcttttaaacaatggatattcaaataactcctgaactgcttcttcattatttagcataattgtagtttacaaatatgcatttataattgggtacaggctacaagtaatataagattttatatttaaaaatttattttaaatttttaaaataaatattttaattcaagtgtagtatttagatagaaaagtccataaatcctatgtatgcagcttgatgtattttaacaaagtgagtgtacccatgaaatcagcaccmagataaaaaatatagaacattgctagcaccccaaaagctttgttcctgcatacttstagtcagtaacccttatcttcaaagataaccactatcctgaatgttttcatgcattactttgcctttttttgtctgtaattgtagagtatatactcttgaatatttgacttcttccattcaacataatatytgtgagatctatcactgttgtgcttgctattttatttttgttttgtttcctttgatgaagcctgttggatcccaagatgggagcaaaaagctgctagttagatatgcaaaatcttgttccccattcagacctactgaaccaaatattatggagataggactcagaaatctgagttttaacaggacccccatgtgaaaytgattcattctaacatttgaaaacctatgattgactgaaaccattccattatgtgtatgtgaatattccacaagttacttatccatgtgtattagtctgttttcatgctgctcataaagacatactacagactgggtaatttacatagaaaaagaggtttaatggactcacagttccacgtggctggggatgcctcacaattatggtggaaggtaaaagacacrtcttacatggtggtagacaagagagaatgagagagcttgtgtagggaatctcccctttataaaaccaacagatcttgtgagatttagtcactatcatgaaaacagcatgagaaagacatgtccccatgattcaattaccccccactaggtccctcccatagcatgtgagaattatgggrgctacaattcaagatgagctttggatggggacactctccccagagccaaatcacatcattctgccccagcctctcccaaatctcatgtcctcacatttcaaaactgattatgccttcctaacagttccccaaagtcttaactcatttcagcatttacttaaatgtccacagtccaaagtctgatctgagacaaggaaaggccctttcacctatgagcctgtaaaatcaaaagcaagttagttacttcttacatacaatgggggtacaggcattgggtaaatacagctgtcccaaatgggagaaattgactaaacaaataggctacaggccccattcaagtacaaaatttagtggggcagtcaaatcttaaagcttcaaaattatctcctttaactccatgtcacrtatccaggtaacagtgatgcaagaggtgggttcccatggtcttgggcagctctgtctctgggtttgcaggatagagcctccctctcagctgctttcatagtctggctagggagtttctgtggcttttacaggtacaaggtgcaatctgtctgtggatctatcattctgggatctggaggatggtggccctcttctcacagatccattaggtagtgccccagtggggactcagtgtgggggcttccaccccacatttcccttcctcactgccctagcagaggttctccatgagggaccttcccctgcagcaaacttatttctggacccactcaagcatttccatacatcctctgaaacccaggcgaaggtttccaaaactcaattcttgacttttgtgcatccacaggctcaataccacatggaggctgccaaagcytggggcttgcacccactgaagctacagcccaagctgtaccttgaccctttttagctatggctagagcagctaggatgcagggcaccaagtccctagcctgcacacagtaggggggcctggcctggcccatgaaaccattttttcctcctatgcatctgggyctatgatggaagggacttccacaaaagtctctgacatgctctggagacatttttcccattgtcttgatgattaacatttggctcctcattacttatgcaaatttctgcatctggcttgaatttctccttagaaaatgtgtttttcttttttctagtgcatcatcaggctgcaaatttttcaaacttttatgctgtgtttgcttttaaaactaaatgcttttaacagcatccaagtcacttcttgatgctttactgcttagaaatttcttcccccagataccctaaatcatctttctgaagttcaaagttacaaatttctagggcaggggaaaaatgccagcagtctatttgctaaaatgtaggatgtgtcacctttaytccagctcccaataagtttctcatctccatctgagaccaccttagcctggatttcattgtcattgtgtatatcattgtcagcattttcgtcaatgccattcaacaagtctctaggaagttccaaactttcacccattttcctgtcttcttctaggccctccaaacttttccaatttctccctcttacccagttccaaagtcgcctccacatttttgggtatctttatagcagcaccccactctactggtaccaatttactgtattaatctgttttctcactgctcataaagacatatccaggactgggtaatttataaggaaaaagaggtttaatggactcacaatgccatgtgactggagagtcctcacgatcatgtcagaaggttaaagacacatcttacatggcagcagacaagagagaatgagagagcttgtgtagggaaactcccatttataaaaccatcagatcttgtgagacttattcactatcatgagaacagcatgggaaagacccacttccgtaattcaattacctcccacagggtctctcccacaacacaggggcattatgggagctacaattcaagatgagattcaggtgaggacacagccaaaccatatcatcatggtactattgatgtgaagttggaatgttgctagttttcagtaattaaaacagtgttgctattctcatttttatacaagtcttttatttcacatatactcacagatttctcttggttatatatcttgggataaaactgctggatcttaagttatgcatttatccaaattaggagatatttccaaatgtttttcaaaacgtatgcaccagttttcactttgatcagcattgtataacatttgaagttatgccacatcctggccaacacagaatatagctataatatttaattttagccatactagtaaatgtctggtggcattgcactgttgctttactttgtatttccctaatgacttattagatgaagcccctttacatggcttattgaccatccagatgtcttttttgagatacctatttaaatcttttgcctcttttcctgtaggaggtaccttctctttattattaagcgagaagttctcyatatattctggatgtgagaagttctctatatattctggatgcaaattctttgatgagaagattatatttcttatatcttaacttactgttttatttttgtattttcacttttctttttgtgatcgatacatatggtttttcctttatggttagggcttttwatttgtttttaaaaatgcctaccccaaatcatgagataktctcccttctgtttacgtctagaggctttattgttttagttattacctttagagccaaatatctgtacttacaaggaatgacagtctttttaaaaatttctaacaaaatagtaattctctgtcccactctttctcccttgtacacacgcayaagtccatgtgttattttccaaatgttttctgctagtgtaaaagaaaaaatctgagacaagttaaatttaacagattttaattgagcagaacaaattttatgaaccagatagaattcgggatcaaaagtggttcagaggctatatcccacaaagtgagcagacaatatttataaccaaaccaatggaaatgggatacagaaacagcttaataggctgcagtttggcagttgccttatttgatcatagtttgcagctttcagcctatgattggctaacatttggttgctatgactggttgaaattcagcaacttgttaggagagtatacactcaggttaggttgcagggtgtttatgcattaagtgaggttactgtttgctatgcatggaggtagctttagttcaagcttagttcaatttcacaataatacatagacataaaagtaatatttacaatttgatattttcttctaaaatcttgctaaacttatttaataaatctaatagctttttaataaattccatttaattttgtatatatacgctcctgctgtcagcaaattccttttgcctaatctgggtacatttcactctttttcttgccttaataaactggatacaatgtctactataatgtcaaataggagtagtgagggcagacatcttgtcttactcttgattttatgaaaagtgcatgcaatagttcactgttaagtatgatggtattacctgttttatttttgtagatacttttatttggctgaggaaattcctttccaaggtttttattagtcatgcatcctggattcagtctaatactttcttggtgtccattaagatccatcatacagtttaccgtcatttttttcttttaatrtgatgaattacattaactgattttttttttttttttgagatggagtctcgttctggagtccaggctgcactccaggcagcctcctgagtagctgggaatacaggtgcatgccatcatgtctggctaacttttgtattttttaatagagacagggtttcaccatattggtcaggctggtctcgaactcctaacctcaggtgatccatccgcctctgcctcccaaagtgctgggattacaggcatgaaccaccgcactcagtcagatttttcaatgttaaaacaaccttgtatatgttgaattttgtctaatgctttttctccattaagatctatcatatgactttccattattttagtcaattaatatgataaatttcattggttgatttccaaatgttaaaatgactttgcataccttgtttttagttatgtgtattattatattttaatatattctttgatttggttatctagtttaaaaatgcacttttgatcatgaatgatattgatccatagttctatttttctgtgatgtctttgtcattggctgcaatggctttgatattaaggtagttctggcctcaggagttggaaaatatttaagtatttgctcttcttcagtttttcagaagtgtttggttaaatcattgtcattttagtcttaaataatttgtaccattgaagccagctgaacctgaaattttctttgtctgaaaggcttttttgtttgtttgtttgtttgtttttctaygaagtcactgtagttaacagaaataggagcattctgcttatgttcctttcctgacttaatgtttggtattttgtgtctttcaaaaaaattgatctattttgtttaaattgtcaaatttttgtaataaaattgtttgcaatattcctttaatatttgtaaaatctgtccagatgtcacctttctcactcttcatgtattttttaattttcttttagagataaaatatcastctgtcacccagactggagtayagtaatataagcatagctcactgcagcctcaaactcctgggctcatgtgatccttcagcctcagcctcctgagtagccggaaccacagtcatgtgccaccacatctggataatttttttaaaaattttatgtagagatggggttttaccgtgttgcccaggttggtattgaacccctggcctcaagcaatccttctgactccatctcccaaaatgccaggattatggacatgagccactccattgccggcccactttctcaataatattttatcagttgcttggagaagtgtattgaaatttgactataaattctttatttctcctttcaactctgtctgtttccgtttttataagcaaaatcagtcaataagcatttaatcagtaatcatatatggaaatgttactgtgtatctaccaaatattgtgactggtattataaatacaaacataaataatacattatctgccatctaattgaattttacttaatttctacaaataccatcaagcttcttctgcatgccagtcacttccctgtactctactgggcaatggttaaaaaagtctgtgacctttgtcctgtttagcatgcagtcctgtggaataccttaagtagtatgaaaaaaacagatctatttgaagaataattacctatcagtaagataaaataactatcggtaagaaaaataattacctatcagtaagaaaaataattcctatcagcaagatatatttgaaaaataattacctatcaataagatacattctttcttatctaccatttcttaatgtattagaaaatattctaaaacattatgtaaaaaagattctatttggcaaagaagtctcatagagaaaaaaaattggtcagcatcctgaagaaagagtagggacattttcacatatacaggacatttcacggagaggaaactgtgtatgcataagttaagagatgtgaaacagcaagagatatgttagagatctacaaatggttaagtacaatgtgtaaaatgtaaagtggtgaaaatgaatatgggaagtagacaatcactaagtccctacatttgacggagatgtttagagtacatctttaccccagcacctttaatagaaagaggaaaatagctgttctttttcatttgaaamcctgatattttcatcgttattatacaaaaagtttttatacttgtgattatgtgtgactttcttttttcctttcgaagtccaattaaaaacaagagagataagggagtagacatgtaatttattatcttaattccagtattaaaaatctatagaagccccaggaacccatggcttgcttttaggaaaactgaaagatatcttaatttttttttcttttgagaaatggggtcttgctttgtctatcactcaggctggaatgctgtggcatgatcatattcactgcagcctcaactcctgggctcaaatgatcatccagcctcaccccccggagtagctgggactacaggtgtcccacaccatgcctggctaatttattttatttgaagagacaatgtcatactacgttggccagactggtctgcacctcctggcatcaagttatcttcctgccttggcctcccaaagttctgggattacaggtatgagccacggtgcctgagcaagcactggaggatatctttgaatagtcttctttttacactgaggctagcagaaacagttcctaagaaagttacaggtgaggatgataggtaaacagttggcttattatcatagtctctcrgaattgaaataagaagtaactggaaatgtttgtaggtttactattttctcaagaagytatgccagcaacagtctcaactcttagagttatatactcaagctgttgaaaaaccctttttcagccactcccttttaatccaaatccttgtctcagactatragaactattaacagtaacttgggaatataaagtttcctattttctttgcccatcacttggggaygaaggaagttagatggaagatgttagatggaagatggcttcttcctgaatgcacactcccttaggaatatatttatttcatgggtggctgagtcctcagtattattaggtgtgcttcaagtgagaagtaggtttaatagatttttgcctgagaaccgaacctaattaccaatgagacataacaatatcatttttgccttcaagaagacttgaggccacatatgtaaattaaattataatctcacaccagtaattacaagtatcaatgattgttatgtaaccacaatcatgggtagaataaagaagttttaatcttttgtgactctgagtttatccaagtaataatttattttcaataaaatattggacattttttcatcttttaaaaattgcttatcctttttattagtagttttaataaatgatgcagaaaaatattctgaatttaagcataatattaactaagtttttattaatttaatacttattataattcttagatttgatttttcatgtttcaagagatgctcttgctggggtggtgacacatgcctgtaatcctgctatggtgaggcgtaggcataggtaggataattgctcaagcccaggagtttgaggtcagcttctgcattataaagagacctcccacttaaaacatcaacaacaacaacaaaaaacaaaaacaagatagagagatgttcttttcttttctttttgagagataaagaaaaagtargcatgtgagagatgagaactcttcatgttaaaacaacatacaattgttgagtatcctacatcaggatatagatataaatgccaaaatcaggaaatagaaaacaagcattctgttaaagtgagcaaaagcttaaaaactattagacaatagaaacaaagtcctgctttttcaaatctctccacagatgatctacatggcatggaatgccaaagatgtggctgtgtcttattattatttccgccagatggcaaaaatgcacccagatcctggaacttgggaggagttcctggaaaaattcatgactggaaagtgtgagtcctgttcatcatttaatcatgcagctctgtaatgaaaagccttcttttgcaaagagatataaattttaaatatgttttgtgtttattataaaccaattatgtacccagmactctattaatgcattaggaagactacagaggaagcagaatatattattgtctctttccttaaaggacttttgggttataagtgacagacagatacttcagtccctgatctcatcattttattcatgattagtgactattggcaatttatttaagcattttcctcttgctatccatgacactgcacaagtaaattttatacatattttaaaattctttcttatctaccatttctttatttttattatataaaatgagttaaaggtttttttttctcaagagtttgttcttctatctctgtattctcttcctcagggaaacatattcacatccacagtaataactctacctttaattctcatttaatattctgtataaactttatctttcaggcagatacatatcaataatatctttcatagatttactcatgccattccttggactaatttttttgtccatagaatgtgatccttatttttattatcaaagttcaactctttattttaaattcaaatgcactcattttcctccacatccttttctttctttytttttttttttttttttgcttaataatttcttcattatgatttcaatctctctgtcaaatttcttgttctggttactcattattttccttatttctttacattctctgtattttatggaattccttgaactttcttaaaagagctattttgaagtctttgtaagacaattcatatatgtccatttctttagggtcagtcactggcagattattttgtctgtttggtgatatcatgttttcctgattgttcttgatccttgctgtcatgcaacaatatcatgcaacaatgtctacacatttgaacaggtaggtgcttactatagtcttttcacactgtctttattgctaagcctgttcagagattttggatgggccatctggcatggaccctaagtaccagttgttgcagcattagtgagtcctagtgttgcagttattattttagccaagcaccatgcttggctaaaagaagcatgtgctacagttgtttcagcactagsggtaaactctaagcctggggccacggtgctgcaattgttgcagcactatgggcgacctctaagcctgggaccactgtggctggcatggtgcttggctaaaattctgcggccactaaggctagcacagcactgaggcatgtccaaaacaccatgcccactgaggtctkcccrccactaagggctatccagagcccaaggcagctgtagttggctggtggtgataaagactgaagattaagtctacctcacaggggatacaggttccaacctggtgtgggggcaggtctggaggctcagtctgcaggcactggcctggagtctgagcccctagggttctacctagtgctttattttactgtgacatccaagacaaagtcctatacttacttgcttctctttcacccaagtacactgtatctctctccattttgtgttgcctggagggggaaaaggaatgacacggataatgcaaaacttttatttctactctcgtcaatgtatcttttattattattgtgctataattaggtaatgtgrtctctcacctgactttattagctcttgtggaggtacttttgtgtgtaaagagttgttcaaattgatatttctgcaagggcatgatcaccaaatagtcctatgctaccatcttgctccaccctcctctgaagccaatgctttcttctttaattggtctctcttgacttgcggttaggagaaaccaggctgaacatcgaatattttgtttagaaatctcctcagctaaatatctaagtttattacttacaagttacacttcccacaaaacactagaacacaatttggccaacttattttccactttataacaattaatgactttcctccaatttccaatartatgctcctcatttgtctgaaacctcatcagagtatctttaacttttaaagtattttgttcaacatatttctactaatattctgctcatgatgacagttgtatcatgagagaagttttctttataaaattcttcttttgttttataagcccttatcataatcattcatagcatctatatttctaccaaccatctcttcaaggcaatctaggatttttttttctaatatgtaactcaaagctcttcaacttctattcattatctgattccaaagccccttccacattttaggtatttattacaaaaaagtaccccatttcccaggatcaaaatctatattattttgataaggctgtcataacaaatttccacagactggactggatctgatgttttaaacaatagcaatgtattttctcacagctctgaagggtagaagtccaagatcagtatttcattaggattagtttcttctgaggcttttctttttggcttgtatataactgtttttccccctattttcaaatggttggtgagtgtctgtgtcctaattttctcatcctgtagaaacaattggattaggacccatctaatgccttaattttcacttaattatctatttaaagacccatctccaactacagtcacattctgaggtactgggatttaggactttatcatatgaattttgagagaacagaattcatcttattatataagaattttgttccttccaaggagattttaaattcattgagaatagtggttatctcatatacttctcttatgcttatccctttcttgaactaatagctaatcagtgtgtaagcattgataatgatgatttggaataacatataaccattatttattttatgtatmgtgtaattttgcaaaaaaaaatttcaatttagtgtgttttggttcctggyatgaccatgtgaagggctggtgggaaaagaagaaagattatcgtatcctttacctattttatgaagacatgaaagaggtaagaagtaactgcattttattatttgtttttgaaagaaagaaaagattcatcttctttgcataatacttttgtttcctctatgtctgtaaatatgactaacttaccattctttcaattgcagcttgaaaatggatgttttatgcatccacatctttctagcaccactgcctcccctctactttagacatctaaatttctttggacaacctcatctttcattatccatccataaagaataatattttaaaattctaaatcctaatatgccactccatgcttcaaatctcttaatggctttggtccctacctaaaatataaaataataattaagagcatacatagagtgacattctttcatccccatctatttctacaacctcttcttatgccacctttccttaactcactgagtgtacctgaaaaaatttatttactaattttcatttaacctttttttattcttaagatctttgtcatgtgaactttgtgagtcatacttgcattcaaaactgaagtctctgtcaggtaaaactgttactgtagtctaccttccttaatttgcttaaggtccagcagccctcactcagtctcatcttggtcccttagatttctctaaattcctttaagatagctgttactctcatttatctctaatttgataaatctgttgtacatctcaagagaaaccacctgactcagctaagatatctgcctctggcaggttccttagtcaaattttcatcatcttctgcatcctgcttaaactactttgtacctgtcactctgaatgacagtgagatactgtattggtcagtttttgcatcatgataaatacctgtggctgggtaatttataaagaaaagaggtttaattagctcgtggttttgcaggctgtacagaaagcatgctgctggcagcctgcctctagtgagggccttaggaaacttacaattatggctgaagaggatgaagacccagcatgtcacatgatgaaagtgggagcaagagagagagtggggaggtaccacacacttttaaacaactagatcatgggagaacacactcaatattttgaggacagaaccaaaccattcatgaagcatctgttcccatgatcccaaacaccttccaccaggccccaccttcaacattggggattacatttcaacatgagattcggaagagacaaatatccaaactatgatatatcagatgttattctatttatgggtcaagaagcaacaagaggccaggcgcggtggctcacgtctgtaatcccagcactttgggaggccgaggtgggtagatcaggaggtcaggagatccagaccatcctggctaacacgatgaaaccctgtctctactaaaaatataaaaaaaaattagccgggcgtggtggtgggcgcatgtagtcctagccactccggaggttgaggcaggagaatggcgtgaacccgggaggcagagcttgcagtgagctgagatcgcgcaactgcactccagcctgggagacagagagagactccgtctcaaaaaaaaaaaaaaaaaaaaagcaacaagaagtgtctgggtctataagagggtaagaattatattgaaagaaaacttttctacgttgggccattataaggtcttcaagcaaaggaattttagtctcctcaaatatgagaagggaatctacatgtgctacatgtgctggaagagaacttmataattactcaagggtttatgattctctgtgtcatcaaatcaacaaatattcacattctgagcttgagcattccatccttcatcattcttaaatttaactttcacatgttagacttggaacaactgtgaattcaacttctacaaattaaggtttgtgtctaattttcaacaattgcagctctgtgactacaagaaacagattttttagggccattcatagaaactctctggttctgtttcattgaattgacatgagtcactcaggaaagctaagtctcaggttgtctttctgcttgatcttgctaggtaattaaggttatggctttatgcctcagtttgatttgaaacactgagaagaacacccacctgacaggtagcagggcacaaactctgtctagaatgtcatgcttcattgtatctaatatgccttcctatgtccagtctgaagcacagagaagggaaaccttaagaaatacatcaaataaatatctcttattccttgctgtctttatcttccccgccattctttaggttagaaaatcgtcacaccagttagaatggcgatcattaaaaagtcaggaaacaacaggtgctggagaggatgtggagaaataggaacaactgtaaactggttcaaccaatgtggaagacagtgtggcaattcctcaaggatctagaactagaaataccatttgacctagccatcccattactgggtatatacccaaaggattataaatcatgctgctataaagacacgtgcacacgtatgtttattgcggcactattcacaataggaaagacttggaaccaacccaaatgtccatcaatgatagactggattaagaaaatgtgggggaggggggagggatagcattaggagatatacctaatgtaaacgacgagttaatgggtacagcacatcaacatggcacatgtatacatatgtaacaaacctgcatgttgtgtacatgtaccctagaacttaaagtataataaaaaaaggtaaagagattttcaaatataaaatttcaaatatatataaaaaaagaaaatggacaatactttattttactttccatcttatatactcatactatcaaataatctatgtaggtatgagaggtagagaatcttctttccactataagagaattcttgagataggtatcaattcttgatgttaaatttgcttaataaagtagattaacagatcttaaaaattatacctaatgataataacaggttgctctgttaccattggttattctaaaggtgaattctatttttgaatttgaaagtttgggtattaacctaatctttttctttgcagtttaaatatttcttttagcagatggtttgcttggtataatcaagaatagaatatgtacttagaaaagcaaaatttaaaatgcacataaaaatctaaaattattttatctattactttgtcatatgtagaaccttggtaaatgcattctctgcttcatgaccaaatctgcctgaaatgattatttttctctataatttctttataatcctaagtgtgaaattcagaaggtgttaaagtttctggagaaagacaagccagaaacaattgtggataaaatcctccatcacagctcttttgatgtgatgaagcagaactcttgtacaaattatactactatgggaaagaatgagatggaccattatgtgtttcccttcataaggaagggtgaggccatcatatactggtttctgtacagcttgctattgtgatcatggagagagtagataacagcaatattgtaggaaatggaaagaaatttggtatacttgggagagaaaaatggaaaactaaacaaaacaaaaaaattttagaggaaataatctgtggcaaagaaattcttttttctcaggaagtctaacatgtaagacaagccttctaatgagaaatatttactaaaaagcatgtgtatcaataagcatgagtgttggcacccatttctatgtcagaagaatgccctttgtctgaatcatctagataccctctacattccttaaaaattttactgtgttaggtagctagcttaaataatgttaggcatactaaattaataaaagagtgtccactccttgaatttgttgctatgactatggtaaattattcattcctcattaaagaatctcagtggcataaaaccacacatttcatttctcatttcagtaacatgttggtggatactagtcacctatggccactgcactgagctctcctgggctcagcttcctggatcttctctttctgaaacccaggctgaaattgctgcccatatgtggattatgcccaatatcatgatagagagaaagagcwagagagtcaatgaaacttataatatcttttgaaacttcttttcagatgtggtgtatgtcacatatattcaaagttcattggccaaagcatattagaaatccaagctaagttaaggaggcaaggaggaattgcctaacacatgatggtgaacagggatgtaaaatcttcttatggtaaagaagggagtaaataattgtttgcagtaaaaaaatttaagacattttttgagagacaggtgttttggctataggctataaagtgtaatggtaattataatgtgttttcataggtctcgattttttttcattttrattaggaagtatgccatgggtaagtattgctgggaatatctggatctcrgccaggtacaattttgtctttcaggagatgtttggcaacttctgtagacatttttgattgtcacaactaggaggagactgttggcattgcatagaggctaggaaagctgctaaacatcctacaatgcccaagtcagttctcccttcccccagcaaagaattgtctggctccaactttcaacagtgaatatttaaatcaattaagtaaaatgccaaagttgagaaaccctgagccagactgacatagatatttagacatttttccctgttttttcctacaaccaggcttccaactatatctctgcattaccctgcgagatattctatgaaaatggcattaatttttcttatcagatatttattgtaaatgctatgtcctatatccttcctgtaaggtttttgataaggataacattttgaagactgggaaattctgtggttaaaaaaaaaagtttaattgcatttaacccagcaatgtccaatcttacttgaccataaaactttttttcataaattatcatttgacatggggaaacattatatatatatatatatatatatatgcttatatgtatttatacatatatttatatatatttatatacatttatatatttatatatgtgtgtgtgtgtatatatatatatatttatttatttattttgaaacagagtctcgctctgtcccccagactggagtgcagtggtgtgatcttgactcactgcagcctccactcttgggttcaagtgattcttcttcctcagcctcccaagtaattgggatttaggcacatgccaccacacctggctgatttttgtatttttattagagatggggtttcaccatgttgaccaggctggtctcgaactcctggcctcatatgatctgccgcctcggcctcccaaagtgcttggattacaggtgtgagccaccacgcccagccagaaaacataattttaaaaggactaaaaagtcctttatatcttttgttaagaaaattcttgaagccaaagaatcgagattttgagatgtgtttttttcccagtgacatttctataagctatttaagggattgtttatttacacaggatactgaaaaaatctgtgggaattttttgaagattaacaaggtctagaagtatgggagtggaagtttaggatgagagatatggcaccgatatgatgtccaaaagttaaaggggtaaaaataaagggtatagtaatttaaattaaaacttgtttcagaagaaacattttacagtagtctcaaatgtgttattttatatttctttttaggtgtttcaggagactggaagaatcaattcactgtagcccagtatgagaaatttgaagattatgaaaaaaaaatgaaagagtccacactgcagtttcgatcagaaatctaagaagcacctgctttttctcaatctcctttagttagcacttaatttataagaaaaaaatctttcctgtgtttggtaaaggaaaattcagtagtgatgtatttcttatttacccacattgtttgtaatggaataataaaaaaattgcaaagtctacataggaaaacccaataatatctctatgattttaatttctttccactctgttttggctagccttacaaatgaaagtataaaatgaagtttaaaatctacaaagttaccctatttttcaaatctaattctgaattgctagacttgccaagaagacatttaggccagttttcaagattaatggatcagaacaaaaaaaggcttaatttctctctgttctatgctgagagtaatcccagcgtaatataagtttgacaacatctttgtacaagaaattcactgaaatttattgccctagaatggtttactatagattaaattttgaatagtttattattcatagtattttactgtcatattttatatgttaatgatctaaaataacaccaaacaagtaatcggaaaatgtgttgaatgaagtattgtttgcatagtaatgtgttatctactgacagagagaaaaatcagttagttataatgatattaaagtgattaaaatgtattaaatacctcttgtgcagtaaccctgaatgcaaagaactttaagtcaggtgagagacaaaaagacaacgtggggaaactttgtcccttctgctaaattttgctgtgaacctaaaactgctttaaaaaaataagagtctctcaaaaaaaaaaaaaaaaaaaaacaaaataaaaatgtatacacagagaaataattatgagagcttacaaaacagccacaatactagcagctgacatttactgagtacttaaattgtgccgcaaactatgctatacaatttacatagctttagttcaactgacatccattcaagtctttaacatatatattttaatttttcctaattttactgaaagtaaactgacagagagggtaataaatacccaagcacacacgtaaaatattcagtaaaagcatggagaaagaatagtttgattttttattttatttttttaagagacaaggtctcactatgttgcccaagctggagtgcagtggctattcacaggcatgataattttgccactgcgcctggcctttcttcataatgggttaagagtctcagtttctcactcttattcccctaaacccttagtaggtatcctgtctcttttatgttctcatatatctgccattgcaggttaatcagatcttctaatttatagctaattcagatgtgactacatttacaaagacagctgaaaatccttcctgacatgaaaatagcagatctcatatcttctatgggactgtttactgctctaatctagcaatctcccaatcttctgaattattcaccattgcaataaaaagttttgagtactctccaaaaatatacacacattcatttcttggaaattacacatatgtatgttgtatgaatatattaatcatattgcggaatgcacataaataaaaataaaaagaacataaaaaaagaataatctagaatatatttttattaactataaaaagtacatttattctcactaaaatattttaattgttatactttagaatgagaaaaatgtgattaaaatgtctttattaatttaaaaaatcttggtttgacaccttgatttggaattatggttctaaattcaaattatttcagcactttgttgcagtgaatataaaaataaaaaaaggcataaatgaaagaattgcaaattttcctatgcctactaaaacttatttgccttttcagaaaaggtttttgctgaaatatggtaaattcctttctatctttgttctgtctttatgcaacatatcattcatgttgcgttttttttttttgtttctaacaaggaagatcaaaacctactgaaagtccatgaacatttctaaatgagttaaataactatgttgttttccagtttttggaaatgcatttatattagtatttttaaataatacatttacattattttcaccatcaatttccaaaattttcaaaagtccttctccttagttcacttttgagttatgttttaggaagtccttattatcctattcattgttaatattaaatttctctgaaatcataaaactgacaagcagtttttatcgtaaagagcaatttgaaaggacatttttaaggatacattttaaaaatggcaaaacttttgtgcttaaatatttgtatgatttatcttcatctttttaaaaggtaaaatttgttcttcctttagagcattgtgtttataaaattagttatatatatgataaccaattttctgcaaacagtcacccacttcagtggctgaaagtaaaacaagacaaaacagttgaaaatgccactgtcaattcttctgtcttcttggaactccctttttttagaatattggtggtactactgcacatacttcataatcatctgacatagggaacaaatgaggattctagtgtgaatgtgcaaattgtattggaataaatatcaatttctttcttatttttgtcattacatatcattatatattatcactatatatgtataattatatataatcactatatatgcataattatatataatcattacatatatgtataattacatataatcatataaactggggactgtctgtatgcatatatgtgtgtgtgtgtgtgtgtgtgtgtgtgtaaacagatggtccccaagttatgagggtttgacttaacgatttttccactttacgatgggtttatcatgatatggtcccattgtaagtttagagttctttaaaaattacaatggaattgcagttgctattgaatgaataacacattctgcatcataataaaattgaaaaattgtaagtcaaaccattgtaaattggggactatctgctctttgccagaattcagtgcattttcaacttacaatattttttatttatgatgggtatatcaggatgtagcctcatcataagtagagaagtatttgtacatgaataaaatatatatctatgcacatgtatttatagaaaaatcaattaacattttcttcttgaaccacattttatgaacctaggtactctttggagtgtatgtatgatactttaaagaacaatcctgtaaatcacagataattctttacttgttatctgcctttcaggaacatttatcaactagttttctcttcaattctttactgccaacatattattttcaaaggttccacattaaactaccttttagtgactaaaagtttcccattactttttactcagtctctcatggtcttagaacctaggtttctgaaggttgttgtctctggcatttagattaccacctagacagaacttacattaaataaactcaaattaactctttaacttaatctggtgttattttatatcttaagatatcatgactgatgtcaaactatctcatttcccctttatggctagttcagatacattaaatgttaaaagaatgagccaacacaactaattctgtagcatctaaagcaaggaaagttagggtaatctaatcatttgtgttcttcatgacacatattgaagctattgtaaaattcaactgctgtgtctggtgatatttgttcaagatattcccatcaatgactacctttttgttcacaacatttgaatcagatttgaatcacctctgtcagggtctccatatacaatgaatcacatttcagtcagacctcttctcttcttcatttggcttccagcccacatcagggtgcttctgctatatatcattgctccctctggcattaaatagcactagttgagatacaaatccttctatccaagattcactattgaggactaaaaattattgatacacaaaacaacttgaatggatatcaacggaattaccctgaatgaaaaaaaaagctaatctcaaaaggtaaaatactgtatgattttatttatataacattcttgaaatggagaaccaattactggttgccagaatttatgaaaaggttagaagggaagtagatataattataaaggagcaacctgagggatactgtagtgatagaaatagtcacatattaactgtatacatattctggttttgatattgtactacagttttgcaacatgttaccactggagaaaactgggtaaagagcatttgtgattttgtgtaatttttaaaacttcatgtaaacctacaattatcttaaaattttattaaaaaaaaacccaggctgggtgtggtgctgacacctgtaatcccagcacttttcatggcggaggcagggggattgcttgacagcaggagtttgaaaccagattgggtaacatagcaaggccctatctctacaataaatcaaaaaaacagaattagctgagggtggttgtgtgcacttgtcatcttagatactcaagaggctgaagtgaaaggattgtttgagcccaggagtttgaggccacagcgagaggtgattacaccactgtactccagcttgggtggcacagtaagaccgtatctctaaaatattatacaataaaatgaaaataaataaagaacaattttaagcaagtgatggtaattatagcctaaaataaagcctagtgaaagaaaactacttatggtagcatttaagagggttctaaaccttggtaaaggacatctttagggcttagaaagccctaaagtgaaacacatctgctagttactgggtatttggttagctgagcacagggttcagctggctctcagccctggggatacagaaatgaatatgctgtacttttaaaatattaactttaaagtattaaaaagattaagtttccaacacatgaactctgagggacatattcaaaccttagcacttgctgaagaatgttcttgattgacacagcagaaatctatcttttaatgtgcgttttatttggcttcctgactaggaatattctactattctactctgagcccagagaagtagatgacagggtctgaatctataatgtggaaaaagagaaaataatagtccatgaacactaagctgtcactcatattctggggaatgtagacattagatattcccaaagctaatcatatagttactatagaaaccaaatagttcctaaattgtataaaggggacttttcatagcaaagaccttactgcaaagaatgaatcctgataccttctaaatttcattagcattatattggctataacccaagaactctgcacttcccatggtgaaatttttatattaaaaagacaaatttctcttaagtctgacagtgacctaaaattagatcaatgatcagataattccatgtgattatcaagtgctaactagcttaacttcatctataccctgaaatatttaattcctttagaaagcttgaccatattcagtgcctcactccaacgtactaactgatttataactttagaaattatggaaagcttctcatatgttagtaccacacaactgaaggagtcaacattcttgcctacttgcttgcacctgctattagatatttttattatccctacttgtttttggtttgcatgcttcccatccatgcctttcttttagtgtgtggctcagctttggcttctaacagataattctgatccatggctttgcccctcagaatttgaataggactgtacactacattacttgtgttctattgacttgtccataatgactatatgtggcagctttttgcccccaggtcaatcttattattattttatctggtcattcaagcgtcatctatttcaggacccactcactgttttgtgtctgaattgctttcactccatggatgtaaacctgaagactatacaagattttattgtatttagcgcccaatgaataaagagtattctaggtttggtgagagattaagaa

SEQ ID NO: 93508 - DNA, 193689 bp, Homo sapiens
ttcttgttgagatagggttatccatgtgaacttttgcctctgacggtcgcaggtattccatctatgcacatctgtctagatttcatacctgagcttattgcacagccagaacttgagaaacaggtaatgagcattttggagctttaggacaattgatctctctctccagtcttactagttatacaaaacattttataatttttaatacctaaagatattcttgagaaacatgtaataactggattttgtattgcagatatttgctatccagttgctttctcacttgtgtatacaatatgcattaccaaagtcacttagtgtggctcgtttagctgtcaatgtcatgggaactttgttaacaggtatgtagccaatcamcatcaacaaacatctgacataaattattatagttcctatattttctgcatttagtgatgcaatatgttttttctgtcactctgagacagtatgatacaatatgtgttaaatactagtttaacttatgccgtcttttgaattcttcttttggaaacttctgtttacaaatgtgatttatagtgtagtgggaatgaataggtaggcaaattgtatttttcattttgtgaatgagtatatatagatttgtaaatataagctttctgtattttataaatggaaaacaaatacactttcagaatgtaattgtatcagtagataacaaatgttcatttattacaaatgctcagagttccagaaaaatatcatcatatgtataaatgaaagataaatgtattagatgtcttcataagttctaaaacatattctgatattttaaccaccttctggtttgtagaataaaatggtctgaaaataaactactttaaaatatatgaactataatgcaacccttaatgtaatggcatagttaacttagtattctttctcattataatatttccataataccctgttgtttttcttttcatcgtatttatatcctgttataattatttgtagtgattaagagtttacactgcctgaattcaatctcagccccaccactaactggcttgtgatctttaacaagtttcttaacctctctaacctttttttaagagttttctcatatataaaatgagtgtcataatagtactttggtcattcataagattgtaggaattcaatgaaataatgcatgtaatgtacttattgcaaaacttgtgcataataatttgtatcttggataaagactgagactactagattgtgagctttctgaagacgggttggctgtgtttagagaacttcatatctccagcacagagcatagttccccttagtatgttgtgtaagctgtgttgaatttatatttgtaaactaaaatattgtttcatttttttccaacagttttaacacaggctaagcggtatgctttttttatgccaactctgccaagtttggtctctttttgtcgagcatttcctccattgtatgaggatattatgtctttgctgatccaaatagggcaagtttgtgcctctgatgttgccactcagacaagagacattgatccaattattacacgtaagtggtaacttattttcaagggttatcttaatatctcaaacaaaaaggccaaattcctttccaaatttcttggccttaatgttttttttcccttatgttgtaggtcttcaacaaataaaggagaaaccaagtggatggtctcaaatctgtaaagattcatcttataaaaatggatccagggacactggaagcatggatcctgatgtacagctctgtcactgtattgaaagaacagtaattgaaataataaatatgagtgttagtggaatttaaaacaaaatttaaaacaacaaaaagttgtttgctgcatatacccaacatgaatctgcatattagtaacaactctaaactgaatgggaacagtaaagtattgtcttggaatcactaaaacaattcaattcaacatgagtatagtttagaactttatgagaattatgcttgcttgtttctgattggcacatctttggatctactttgctgatatgtttctattgtagcagctgagctttttttttttccactgggaacacatgtaagaaactcattattggaaagggaatttggccttgtatttagcttttgaagtgaagactgccatgcctttaatttcttataaaaatgagtctgtgggtagccctagtgtttattttaactgtgagcttgtaacagaatgtgacaaagatgcaaagatgggagaggaaaaaagggtaaagggaaaggagaattaaggaaataataggagttaaaaacacaagtagaaatctcaaagatttgcagtgcaagtaatagtaatgcaagttggaattctagttctcaagaaagagtattgagaagacttttaaaaaggcaagtagcttttgtaaatgatttctgtggaaatacagatgaggatttaaagatttcacatatttgcttcaatttttattaatatatgaagccatatgtttaaagagatacttgaataatttggaattttaagatactggtgtaaaagtgtttacagaaacatctttgttcaaagaagaacctgagagatctcatttagttttatgttttaaatttatttttataatgctttattaacttacctaatgctcagaggggggaaatatgtatcaaattaaatgaaggtagagcaataaaacccactggattaaagagctcttggtttgtcatcaggattataattcatatcttactttgagaagatctttgagtaagaaaatgcagtgtttgaacctgaggaaaagttaaagtgtagaaaatattgtcttgccgaaggattttgcagtcctctgtcagtaacttccattgattaggcagacatattcaggtaaaccctaatcattaaaaaaaaattatcaatgtagaaagtaattcccttttttctctctgagatatacctcaatcacacacttccccacccccacttgaaacagacctcttcacttgtgttttttttttttttttcctgaggtggagtcttcccctgttgcccaggctggagtgcagtgggatgatcttggctcactgcaacttctgccacctgggttcaagggattctcgtgcctcaacctcctgagtagctgggactgcaggcacgcgccacctgtatttttgtatttttagtagagacgggggtttgccatgttgcccagactggttttgaactcctggcctcaggtgatctgcccaccttggcctcccaaagtgctgggattacaggtgtgagccaccgcacctggccagaccgcttcacttgtaaaagaaattaggctaataagaaggtgtagtttttgagaaatgaaatttaactttagccttttcactagtaaatagtcacatctcattttcttcctttgtaaaatggggttactactggccctacctcatattctatgagaatgagtttgtagctgtttcaaatcatgaagtgcatagtatcacatgtgatagaatatttataactttttattagatgcttaatgttcaattaagtaattttgatgtgaaaaataaaagtaataaaagtatcttaaaaatagcataagaattttcatatttttaaacaaggcagttttgtagtcccttaagattaaatacaactgctccttttttttttaaactgaggccttgcgatattttgtgtgaatagatatgccctaggagttcagaaaaagttaaaagtatgttttctaattaaatgcagtgcacattcytggatcaatattcaaagactggtcataacctgctgtgttaaaataatcacatatgctctttttcatcagatttgttgatgatgtaaataaaatgtgtaaatatattagtaaatgttaatattcatgtattttaagttaaggttataaaatttgtcacaatgtgtttttttattcaagtgaaaacagatgtgtgcagctattttgaatattggtttataaacattcatattctttatcaaacgaacctgtagtttttgtgtttcattccactagagttaacctgaagggaacggttcaagggactgtattcgaggtctgtatggctccagggcctacgtgtatccctttctgttatgccacatacattaaatggcaatgcaaggtgagagccagttgaaactcttagtaatttaggagaggaaaatgagagtagttatactagagcagttactcaaaagagttgattttttttttttttgagacggagtctcgctctgtctcccaggctggagtgcagtggcgccatctcggctcactgcaagctccgcctcctgggttcacgccattctcctgcctcagtctcccgagtagctgggactacaggcgcccgccaccacgcccggctaattttttgtatttttagtagagacggggtttcaccgtgttagccaggatggtcttggtctcctgacctggtgatccgcctgcctcggcctcccaaagtgctgggattacaggcgtgagccactgcgcccggccaagagttgatgttttaaaaattataaaagagaaatgacaatttgaaggtatttttaaggatttatttttaaacattatccttcctttcattgtcttaacagtaaattacttcatctttgctcattcatatgtattttcacattactgaatccctaacacccagtttggggtttgctttgccttttttcacttaaccttatatgggattttttcttgcaagtttaatttttataagtttattggcttcataatgtattgaattcatctgtcataaccacctccatattactagactgggaagttcataatttttttcagtattaccaatagatattattgtcaattgcggtatcacattttctttcgtttagattacgtctttaggataaatatctggagctcagattactaggtcaaagggtagagtttatttttatgactacaagttttgtcatttttggtaagatatatcacaattgacaatgaggcaaacaaatcaactagccccctcctgctctttcttcccagcaaactccttccccaaactagttacttgaatttgagaaacagtatgaggttttgccttttggagacattattatttgagccaagtttaggttatacagattttttaaaaaaataacatgatttggcaagatcatgatgaacctccttttctttgagtaaattaaagtactactggcaaataataaactggtcttaggagggatggaaggcggataagccttaatggaagtagaagtgatctgatactggagaccctgagagcttgtctctggcttattttagcatccgggaaagccttgaatattatgaaagatagattgtagcccgatgtcacagagccttcttacttaagtttggctcagcagtctggcaattcccgcctgagtcttcgctatcctggctactgcaaagctgggtaatttaaattgagtggcactgataaatgctcaaagaacttggcaaagcttaaagatacttcctttccgctggtctacggacgtgaagaatgagacttccagtttccaaggaatttgctgcatagactctatcgccggtttcaaaagtcaaactgagacgactttctactttaaacaaacactagggatttgctggagtggcgacaaccttccgccgcgtaccttgagcccttgtttttttttttttttttcggagacttccattggatgccgaagttctcgccccctcacctcgcaccgggactggttgattcctggccttggcgggtgattggtcgagctcgctgggctattgggcgctgggagtcgagggggcgggaggcgggaattcgtctcgggttgtgtggttgaggggtctggtgggtcgaggaaaggtaacggcggccccagtcctgcacacaaggccggggaagtagcagcacccccaggaagagggaggaggaagggctcgtgccctttcttctcttccagggctccgctttatttgctctcagaagtcggtttcctttccttttcttcagtgaatcggagctcagagcgttgcttcggtttccctccagacaggcaagtcggagggaagtccacggaaagggcttgagttcttctgcacagcctgcgggcccatgggtggtgactggatcaccagggtctcggggatctcaactggctgggggaggagggagatacggggcagaaaacctgaggagggagcctatccttacctcctttgagcgcaggcctgttcttagcccgggcgctgcgttaattcttggcgggaggcagaggggtgtgtttatcctttatgcaatgtttgggggaagctaccccattttgacactattgttgccacagccggggtacaggacgggctgatttctagattatatctgagtaactaggccagcgttgagttgttgattcatattaagaggttagattccaccatacctcattctcagagctttacagatagaatcgcaaaatgttagagctggaaaataccctagaataatggttcttcttttggagcacacaagcagtggtgaatgttattattggcttcataatctattgaattgctattttaaccatctcttcgtccccaggttgaatttacaattttttcccacgactgcaaataattccttatttaataacagtgcatgtaatttcccccgctattttgatttccttgagatatatttacgggaagagaaatctatggactttttcttcagaaaaatgcaatcatgtacagaaacttatgcttgcaatttcaagaggtcattgtctctgaattacatccgtggatcctaggttaagaaaagtggtttagaagaggtgaggattaaagtgatcctcatctgtatcagatcctgggttaggtacattctgccctggctaattttcataaaaaccctgtcaggtaagtagtagtatttcaattccatatatggagaaacaagctctgagaagttaagtgattcacacagtggaattcaaacttaggattgccttactccaaagcccatcctgtttctataatactctactgatcttcaaataacatttttgagtgcctactatgtgccaaggcattctctttcttataacagcctttaaattaaattaggggttatcacaggtaaggatcttagactagagaagtaaaaagatatgtcaaagataacatacctgagtcaaagataacataccaggcagtataccaaaacctggtatagaacctatgcttcctgacttctggtcaacagcttttttcttctaactggaggactgcagaaaggggtaacacaaaggggaagaactggagaaagagtgatgctacggagttgtagagagagaggcctcaggaacttatttgtttctgtaggttgattacatctgatctaactgttacaagagctcatgtttaatctggtatgtactttatcatatttgcacattatttcacttaatcattaccacaatcctatggggtacatgcagtcactgtggcttagagaaggtaactaactttcccgaagtcacacaactaatacctggcagagtgaaggatacaaatctagatttgttagactctaagacatgctcttgaccgctgtgatttataagactaggaaattattttgtttccatttgttttgtttatacttttattaattccagtttytgtttccagatttctcycttagttttggttctctggttttctttgtaaggcgtgtctcaatatttgacattttcatttctgttgtagttaggaatctgaaataaacaggaaagcactatgtcttcaatgtggtctgaatatacaattggtggggtgaagatttactttccttataaagcttacccgtcacagcttgctatgatgaattctgtaagtatttttcagcagttaagtttttattaagatatagatacttatgacccataaagtacattgagtatttgactgcattcatattctcagtaaatggagaatattttctgggttcacttggaagaatatctaacctctgggaaactactgattgcagctaaactgtatatatctgtggttaaggcaaagaagaacattctgaaaaatgttctcagctcatttggaatttctatacttttaatgaaaaactgctatacttttaagtaaaaacagagtatttactatcttttacacagaatactatttttctcaccattgttttgtttggatcatgtagaaaattaatatacaaatttgagtaaaccagctttccagttttgttacagctattttgccatatgtacttcatatcttatttactggtaacaagattattagtatcctgaatttgttcttttcctttcctagccatgtttttatacttttattacatatatatgtatccataaacaatatagaatattattttacatatttgaaactgtgcattgatgtgatacggtaccttactttttatgcagaacttgagttttttaacttagcattatttttaatgtatagccctgttgattcttaatccattttaattgttgtataaattccattggatgaatataccagaatttatctgtccattttcttattggtagacatttaggttgtttacattcttttgcagttacaaacaatgctgctgtgaacttccttttttctttttgtttttgagacagcgtctcactctgtcgcccagattggagtgcagtggcgcgatcttggctcactgcaacccctgcctcccaggctgaagctattctcctgcctcagcctccccagtagctgggattacagggatgcgccaccacgcccagctaatttttggatttttagtagagacgggttttcaccgtgttggccaggctggtctcgaactcctgacctcaaatgatccacctgccttggcctcccaaagtgatgggattacaagcgtggctgctgctgtgaactttcttatgcatgtttccttgtgttcatgtgggaaaggttttgggtgtacacatagaactggacttgctggagctgggcatcttcactttataagaaattgtttatttctctaccaagtagttgtaacaatttgtactctcactagcagtatccttcattaagttttcatcaaatatattgataggtagtaatgtattctggttttacagaaatcattgatgcttgcataattctggcacagattcctcttttcatttcttctcttgtgcttgatattttagtaagataatcttagggagaggtgtaaaggaatacagtttggatttaactaaatatgagttccttctgctattgttgtgttccctggagtgcaatctcacttttccttgctgttctatttaaacttcagatggagagagacctttataaagttaatatgtttattattttcatkggtttctgtgttcatagattctcagaggattaaacagcaagcaacattgtttgttggagagtsccacaggaagtggaaaaagcttagccttactttgttctgctttagcatggcaacaatctcttagtggtaagtagttgcttgatatcttcaggttacttactgggatctgagaaaatataatacagtattctttatccagactggttcagccatgctgtcgctaacttaaatatttgtttaaagatgtttctttgaaataagttataaatcttccaaaagagtttcaatatagcaaaatatgtttaattaatgctaaaatagtattgaacataatttagtcttttgatgagtcggaaagtacataaagacttggcagcctgggcagcatggtgataccccatctctacaaaaattgacaatcaattagccaggcatggtgatgtacacttgtagtcccagctacttgggagactgaggtggtaggatcgcttgagcccaggaggtcgaggttgcagagagctgtgattgtgcactccagcctgggtgaaagaaaacaaacaaacaaagttttggatgcttagagttattataaaaataattagatgataatttgtatgtaaaagatgcaagagatgggctgtcatgatgctgtaacacatactaattgctttttttggggggggaaatcctttaatatatttgcttacctgttcctttctcataacatcagcacatggaatatataaaaaagaatacattctagttgatctttctacttgtttaaatgccagataaacagaaatttagtataatattgtttgtatgaatttatattacttcccactacttttcctttttttttttttttttttgagtggcgtcacctgggatggagcatagtgatgtgatcatagctcactgtaacctcaaactcccaggctcaagtgattctcctgcttcagcctcttaaatagttgggattataggcatgagccaccaggccaaactatttttactttgtttgctaacaaatgcctattaatatttacttctatgaaagactatataaactacataatgaatcagaaatataatattggatacattttagttacattagatggctttaacctaaagtattaggagaattgaggttaaacatggtatgtgtatgtatgtatgtatgtgtatataggtatatagatacatttttaaaatgaaatgtttgttactaataagagtatattaaggctgggcacagtggcgcacgcctgtaatcccagcactttgggaggccaaggcaggtggatcacctgaggttggaagtttgagaccagccagaccaacgtggagaaaccccgtctctactaaaaatacaaaattagcctggtgaggtggcgtgtgcctgtaatcccagctactcgagaggctgagacaggagaatcacttgaacctgggaggtggaggttgcagtgagccgagatcgcgccattgcacttcagcctgggcaacaggagcgaaactctgtctcaaaaaaaaaaaaaaacagtaaatacttcataagcttttggttgttcattttgattctcactgacgttaattttgggaaaaatgagtttatcggtactaacttcaggtcttaatggcagatgtctggaaaatagaattaggaatatttatatggtacaaatgggaaaacaatgtcaatactgattatttttaaaaataaattatttagcttttttgggggtatatgaattgtacatttgtatacaatgtaggcacacaatgtaaacttattacaatttggtattatatttagcactaaaattacctattttattgatttgaatattgaccttaaaatgtattttgatgcaagtatcagaattaatacatcaaaaaacatgtttctatttgaaatagaagtataattgggggaatgatttaacccttatgtgttagattattatctaatatattgaactttcaaattcttcatttagggaaagagtagtaattaaggatatactttatgtccttgtttcaatccattcttgaattttagataaatcttaatataaatgaatacttgagtagttgtacttttattacattattaatcttagattattagatttttacagattacataaatgggtgataatttccctataaatgtttttgttttggtttttgaaacagagtcttgctctgtcgcctaggctggagtgcagtggcatgacctctgctcattgctacctctgcctcccaggttcaagcgattctcctgcctcagcctcctgagtaggtggtattacaggcgtgcactaccacgcctggctaatttttgtatttttagtagagacagggttttaccatattggccaggctggtctcaaastcctgacttcaattgatgtgcctgcctcggcctcccaaagtgctaggataacaggcgtgagccactgtgtccaaccaaatgtttttggcttatttctctcctgtcctaatttgatgctgcagataaagtgaccagcttgtccaggtttgccaggtaccttcctggtgttagccctaaaaatcttttatcttaggaaacctcccaatcctgggtgaactgggctgtagagaatgattgatgtttatttaattagatatattataaayagatgttctttcatttttagggaaaccagcagatgagggcgtaagtgaaaaagctgaagtacaattgtcatgttgttgtgcatgccattcaaaggattttacaaacaatgacatgaaccaaggaacttcacgtcatttcaactatccaagcacaccaccttctgaaagaaatggcacttcatcaacttgtcaaggtaatttatattttgcctgggtcagttgatatctgtaataagagtcttaattattactgttataagccctaatttatataagtttggttagcataactgattatatatctctatctagtttctctggaatgattttaaaatagcacagagtggtcaaaaatccatagacgtttttaaattcttggtttgacttttaatttattgagacattttgttgtcctaaataattttttaaggaaggcaaggcaaaataaatgattttccaaaattgatgttatttgtagccattattgttaattatatgttagaattctataaaacaatgtttgtatcctaagacraaatctaattagcctcattgattcattcttgataagtttgcctggccttctgaggccagtatcctacataagtatcaggtakgtttatgtgtgatctttaaataatttttactaattttagagaaatacattaagagtaacataagattattaataatatatttaaaaaatatttcacctgcttttggctgtatagaaaggatagactattatttacctaagaaacctagggaacatcctggacactttgctctttcttatttcttcatgtacatctccatatccattggtacctccatagtccaaactaccatttcttgtttagagcatccaataacgcttttttctgcttttactcatgctattcctttaccagtcactggcagggagacagaggttgccatgattgacttaagtcaaaacaaagagtatccatttcctaaaatcaaggatggagtcagcttcctctaaagcatgtgactatatagaggagggtagatgattgaacttctggtaggaatgaggaaagagaagtggaacagttattaaataggtgaccaatagtgttgtctacattgttttgattttggccttttggatttcttccctttccttcaaagatttatgctttctccttcctcagagcctttgcttctattagtgtctcttctgagcaaagttccatcttcaatttattatccttttcttcctcagtttacatgtgacttccttggggtatccatcactgatttttctgtcagagtagatttgattttcctattatagtctgtcttctccttgtgtacctttcctttatagcacttgttacagtttgtattatatgtgtctgtctaaatcttttattaatctctgcttccttggcagactacttcatgaggttaggaatattgtcaatttgcttaccattgtatccctagaactctagcagggtgcctggcatatggtaggtgctagataaatatttgttgttaggaatgaatgggattaattttcagctaattataggaattctggtgtataatatttatatacaaccttttaaaaacagctttattgacgtttacttgacataacaaattgcatatatttaaatggtactttttttttttttttttttgagacagaatctcactctgttgcccaggctggagtgcagtggtgtgaccttggcccactgcaaccttcacctcctgggttcgagcaattatcctgcctcagcctcccaagtaattgggatgacaggcgcctgccaccacacccagctaattttttgtatttttagtagggacaggattttaccatgttggccaggctggtctcgaactcctgacctcaagttactcacctgcctcggcctcccagagtcctgggattataggcgtgagcgaccacgcccagcctaaatggtacactttgatacattttgacatatgtacctccatgaaactttcaccagaatcaagacagtgaacatacacaccaaccccatattcactttatccaaaactttttaaacatgctcactttcccaaaaagttttctcatggacttttgttatccctctttcccacccctacatgactcacctccccaaccaaccacctgtctgatttttgttactatagattagtttgcattttctatagtttatataaatggattcatacaggatgtatacttattttgtctggcttctttcacttatgacaattattttgagattcctctatgttgttgcatgtattaatagtttgtttctttttatttctgagtaattgtgcatggatataccacaaattggttattggctgtttatgtatatttgggttattgctagttctgggctattacaaagacagatactgtgaacatttgtgtctacatctttgtatggatgtatgttttcatttctcttgggtgaatactaggagcagaatgaccagattgctttgtaggtgtgtatgttttaacttttttttttttttttttttttgagacggagtcactcttgcccaggctggagtgcagtggcgcaatctcagctcactgcaacctctgcctctcgggttcaagtgattctcctgcctcagcctcccaagtagctaggattacaggaatgtgccaccacacctggctaatttttgtatttttagtagagatggggtttcaccacgttggtcaggctgctctgtagctcctgacgtcaagtgatccacccatctgtgcctcacaaagtgttaggattacaggcgtgagccaccgtgcctggccaactttttaagaaatttccaaactgtttcatgaagtggtcataccattttatattcccatcagcagttatgagagttccagtttcttcacatccttgtgaacccttggtatggtcagtccttttaattttagccattcttttttcctggagatagggtttcattctgttgcccaggctgggtacagtactgtgatcttggctcacttggctcattgcaacccctgcctcctggaaccaagtgatcctcacacttcacactccctagtagttgagactactggcatgcaccaccacacctagctaatttttatagtttttgttggttttactgtgttccccaggcttgtcttgaacccctgggctcaagtgatctgccttcttcggcctcccaaagcactgggattataggcatgagccaccatacctggccttaattttagctactctaataggcatgtggcagtatctcattgtggttttaatttttatttcccatattttcatgttcttattagctatccatgtatcttgtttgatgatatgtctgttcgaataattgcctattttttattagtttgtgttcttactgttaaattttgagacttctttaaacattttgaatacaagtctttgatcagatagaattttaggtttacatttaggtctaagatccattttgagttaatatgtgtatatggtgtaaggtatggattcaagttcatttttttgcatgtggatatccagttgttcagcacctggatatatcgaaaaggctatcctttatccactacattgcctttgtgtctttatcaacaatgagttatccatatgtacacaacttgattttgacattactgtgagtcagtgttatttagaatagtctaaatgggaaaaatcaaggttgtattctgatacgctctttatatttgtaagtaaatcctttaatctgtaacctaaatatagaaaaatgcaaatcctaagtatataacttgatgaattttcactgtcataactactacatagattaaaaaaaaaagagagagacattaccaacaccccagaggccctcctcatcttctttttcagtcactgtcccttctttccataggtaattcttgtcctcctgtgaccattgatgagttttgcctttttacagaaatagagtgaaactccatctcaaaaaaaaaaaatggaattatatatgtaatcttgtgtctgtcttctgcttaatattgtatttgtgagattcattcatgctgttgcatatagtagtacttcttgtttctgtgtattatttccttgtatgaatataccacagtttattaatctgttctacagttgttaggcattgggttgttttcagtattgtttaatagtgctgttatgaacattcttgttcaaagggtgcaaataggtaagtattgtctgtagacacatacctggtcatagtatatacatatgttcagctatagtagatactgacaacattttctaaagtggttgaatcaatttatgcgtccccggtcagatccctccaacccctgcagcagtatatgaaagttgttcaccatttttgttagtacttgatatttatagtttaaaaaaaaagttagtcattcttgtgtatgtgtggtattctcattgggttttagttagtatttctctggtgacttcatatgtttattggtcatttggataccctctttagtgaattgcctaatcaagttgtttgccatttttcttttgttttttatttgaggtggggtctcactctgtcgctcaggctagagtgcagtggtgcgatctcaactcactgcactggccagctcccaggctcaagcaattctcctgcttcaacctcctgagtagctgggattacaggcacctgccaccacgcccggctgatttttgtatttttagtagaaatggggtttcaccatgttggccaggctgatctctaactcctgacctcaaatgatcactcgcctcagcctcccaaagtgcttgaattacaagtgtgagccaccgtgcccagcctccatttttctattgggtatttcttaggtttcttgaagattttaaaaaaacataatcgggagatatcttctttctttttaactttgtatcttaaagattttacccctttgatgaacttccttcaaactcccttgctatcaagaccaggaagataagcctttttgtatgtgatgataatatgatttttatttttatgaattggggttacccttatttggcacatggcagttcagttttctaaaactaaatgatcattttgggtggacattccctaccctcttaataggcccatgtcagtttgccccgtatttatttgggacagagtttctccacagtggcactattaacattttgagtgggataactctttgttgtaggagctctcccttgtgagatgtttagcaatacttctggcctttatgcactggatgctagtagtatttccacctctgctctttttgtgacaacgaaaaatgtctccagacattgcccagtatgcctgggatgagaagtggtggtgttaaaattggcctggttgagaatcactgatctaggtttattttgtggttattttactggttgcctggacatgcagagctcaaaattacctatcttatctaaaatatatatggaaatgcaaaggactaaggatagccaggatgcttttgaagaagcaggtcaaggtgagagatttgatccaccaaatatacggatttattgtgtgtaaatatagagtaattaagacagactgaggttagcacagtgatagactcatataaaagtatagagaaccctaatttggtcccacatgtatccagaaacttgatatttttatagaagtgcccctacagcttgtaggggaaaggaagaacttgggtggtgctaggcctgttagatgtccatatggaaaaaattgaaattggagccctactttataccatatacaaaagcccattcaaggtagattaaagacctacttctgataggcaaaactattaggatttttagagtatagtggttttcaaactgtgtttctaagaaccttataaagaaagaaacatgactcataagggaagggggaaagtggatcagggaagttctgggtctttcatccctattttggaaattttaagcaacatttctttttttttctttttttgagatggagtctcgttctgtcacctaggctggagtgcagtggtgcgatcttggctcactgcaacctctgcctcccgggttcaagtgattctcctgcctcagcctcccaagtagctgggattacaggcatgcaccaccatgcccagctaatttttgtatttttagtagagatgggctttcgtcacgttggccaggctggtctcaaactcctggcctcaggtgatccacctgcctcggcctcccaaagtgctgggattacaggtgtgagccaccgtgcccagctgcaacatttctttaagaagaaaatattcctacactttagaaaaaacttgaaaatcagtgctatgtggcataggttcatttctgagtttatgtaatctcaagctttcttttttttttggagacatagagtcttgttctgttgcccaggctggagtgcatggcgcgatctcagctcactgcaacctctgcctcccaggttcaagagattctcatgcctcaacctcccgagtagctgggattataggcctgcaccaacatgcacagctaattttcgtatttttaatagagatgggatttcgccatgttgcccaggcaggtcttgaactcctgggctcaagtgatccactcgcctcggccttccaaagtgctgggattaaaggcgtgagccactggggccggcctcaaatttgtgttttgaaaacagtattggacctgctcatgtaggtctttctctgctgtaaatcctttagggccaaggattctctttttcactgtttttccatggtgtctggccatgggttagactcagtgtaataaatgattgttggctgggcacggtggctcacgcctgtaatcccagcactttgggaggctaggcgggtggatcacctgaggtcaggagttcgagaccagcctgaccaacatggagaaaccccgtctctattaaaaatacaaaattagccaggcgtggtggcacatgcctgtaatcccagctactcaggaggctgaggcaggagaatcgcttgaacctgggaggtagaggttgtggtgagctgagatcacaccattgcacttcagcctgggcaacaagaggaaaactccatctcaaaaaaaaaaaaaaagatggttaaaaaagattgttaaattaattcaagccatgggagtggagagaatgcttagagagaagcaaagaggaaggagggtacctttaagaatatttatatttaggaaaagggagaaaccaatgtatgagaatagttaagagcagtgttacagacattaaggaagaagaaaatgtgtttgctgtgttccaagaagacagtgttggctgtatgcctaagaggttacatgtatggatgttggagtcacacagcaggattcagtcatgtctaggctctaccatttaataactgtatgatactgggcaagctactagacttttaaaaacctagtgttcacatttgtaagattgggataattaatgttatttggtgattaagaggtcctggatgaccttgagaaggagctttcaggattatgggattaaaagacagattatatgagcttgattctataatcaatggttttgctctaaagaacgtggagaaacttagtagggaagaaacgttgatactgtaaagaaagatttttacagacatgaaatatattttcttcagagatccttgcagttatacattttaaatcatgttattgggagtagtctacaagtacataaggcgatttaaaaaatcaaattggacttttcctattgaaagcatgtttctcagaatctttggtaaagtaaactgaatggtagagaagtactttttaaacatgtttaagtttcatgttttagattatggtatgaaatttctagaaataagccttacatcctggttccagttttcttctagaaaaattgcctacctgtaagttatttatgctgttttttttaaattacttatataagactcccctgaaaaaaccactctggctgcaaagttatctgctaagaaacaggcatccatatacagagatgaaaatgatgattttcaagtagagaagaaaagaattcgacccttagaaactacacagcaggtaaacagagtttattggcagtaaataacccagttagttacagctgaacatggtagtcaagtatcaygtttttaatgcacttgtggagattagttgggtcatgtgacagccataaattaataatttgttgtaatttcattttgtagagttacttgttacaaaggagtttattatagcagattattcacagtaacatgtcgttcaagtgaaactgcatggtgtttcttatatatgaggaatttgatagtaaaatatttacttaaggcatatcttagtgatatactactttgtactttttaactcctccattgtttttatcttaaaatagcatttccttttggctaaaatacctttgatatgattattcatgttatggatattttggaattgatagttttaatgtaatgacaagatgtattcttactgagtttttaagattgatacatgataaaatatgtatatttatttctaaaaattactaaaaggcttgaattaccagatattttaaatgaaatttggatgcagatgaacacaatattttctcagaattcatggcagtgagataggaaggctgggattttaatagatttagttacaaataaaaaagataattattaggctgaatacagtggctcacgactgtaatcccagcactctgggaggctgaggtgggaggatctcttgagtccagcagtttgagaccagcctgggtgacatagcaaggctcctgtctccacaaaaaagtaaaaaaaaagaccgggtgtggtggcatgagccctacaggctcatcagacatgtagccctacagactactttccagctacttgggaggctgagataggaggattgctcaagcctaggagttgaaggctgtggtgagctaagatcatgcaattatgcttcaaccttggtgacagagcaagaccctgtctctaaaaaataaataaataaaaacataaaataaaaaaattattaattaggatgttatttgtaggtaagtaactgggtacttttaattgagtatactcaaggttcttgaagtcttatgtagtttaactgttccacttacagtctttataaatttctataattcagccttgtttttagaaatagaatgaactagtttattttatcaaagtaccaatgacaaatgaggtgtgaacctatagagatttccccccgacaaaatgtattcatagatttgcatgtcatcaggtagggctcaacataaaacatttattccctcacttcactggttctcatttcatttttggcgggaatgagattatcaatagaaatgcttttctccccaattatatagtgaatagatttttcacaaataggaaaagcatggatacagtttggaaagaaaacttagtggtatttataaaagaaatttaatcaaaggcaacttggtttatcaaatatctagtaagtaacagtgataatagtaatcgagtaatttattccatcctgtaggaaatcatgactgtttacattaaaagttttattctgagttcttttcaatgtagaattatgcttaaattttgatttacttttattttccaattagatataagattggactttccaatattgctatatttgatgtccatatgatgggactattttatgagaagttcattttacaatactctaattttgatacatcactaattaaagatagtttggctaagattcatgagtcactactatgttctatttcctttaagtgttgtaatgaggtgcttatttgcatttttaaaatttcttttattattgcctgttagaaatagtctttttttggatgcaggaaaaaaatacatagagctgttttggcctttgagaacaactagccagttaaacttctagttcacsttaaacttcattttggttctgtgtttacagattagaaaaygtcattgctttggaacagaagtacacaatttggatgcaaaagttgattcaggaaagactgtaaaactcaactctccactggaaaagataaactccttttcgccacagaaagtatgtattaatgccattgttcagttttaaagaaggaagatatggaattttctaaaccaatttttgacaaaagaggaacaatagtataatacaaaggacagtagcaacccactcagaagtcctcaatgctgtcacatctctgttactaatgtgtgagatggcaaagcctattctctctatgcctcgtttccttatttataaaataagagaattggactagagagagatctgaaagtcatttttttctgttctgtattttaatgtttgtaarttctccaactccttacagttctttcaggattcttagggcaacagttctcaaggagtagtccaaggagttctagatattgagatttttttggggagtgatctgtgaggtgaaaattatttttgtaataatattaagatgttgtaggccaggcgtggtggctcacgcctgtaatcccagcactttgggaggccaagrcgggtggatcacttgagttcacgagtttgaaaccagcctgggcaacatggcgaaaccctgattctacaaaaaatacaaaaattagccgggtgttgtggtgcacacttgtagtcccagctacttgggaggctgaggtgggaggatggcttgagcccaggaggcaaaggtgcactgagccaagattgcaccacactgcactccagcctggatgacagagtgagaccccgtctcaaaaaaaaaaaggaaaaaatacattattgccttttggattgtcttgacatttgtactggtggcgcaaaagcaagaatgggtaaaactgttggtgccttagcagaaatcaaggtattggctccaacctctctctctctctctttctctctctctctctttttctctctctctctctctatatgtatataattttttaaatttatttattttaatttttttttgagacggagtatcgctctgtcacccaggctggaagtgcggtggcgtgatctccgcccactgcaagctccgcctcctgggttcatgccattctcctgcctcaacctcccgagtagttgggactacaggcgcctgccaccacgcctggctaattttttgtatttttagtagagacggggtttcaccacgttagccaggatggtctcgatcttctgacctcgtgatccgcccaccttggcctcaacccaacctatgttaataatagttttccagcatcattagatcacagttttgaaaaaaaaccagtttcatttaagaatgtctttgatgaagcagtaaaaattactaattttatttaatctcagccgtttaggtttttaacattctgtctgaagaaatgaatagaactcataaaacacttttgcatacagaagcaggatggatgtcctggggagaagcgcctgtaggatagtttggattgtgagctgactagccactttttgtcatggaacatcatttttgcttgaaaaagagtgaatgatatactaaccatggtaattctttatgataaaatgagccagataaaatttgagctttcaagtgaaaatcagaattttaaaaaatttgtatatactctgagcttggcagctttgtgataactacagacttttctgatgaaattggtgatattacagaatatgactttttatatttatataatgaaatgtgtcaacatttgtaagatctgtaaaactcaatgaacttaaactcagcgaactaaatattatttaaatgaccagtgcatgatattgcaaaatgatgcctagaaaaggtccatcctaagtgcaagatagactgatggaccttttttctgccctgtccccccattcccaggcaaccacagatttgttttcagttactgtacatttaatttgtgttttgttggtgatcttcactgaagctttatattaatagttggagaaattatgtagaagcttcttctgttaaattgcaataatcatcaacatcattataatgtaagctatatgttgagctctgccacagtgttttctcattcattttctttcctttccttcatgggcttactattatctgaaattacttgattacttgtttattatttgtctgtcctattacgatgtaatgtcagtctttttcatgtgtgtccctcatgcctagaatagcatatggtgcatattagttgtctaataaatatttatttgttgaatgttactgagttcttacaatgattatgaagcaggtatattggtattcccatcgtacagatgaggaaactctgagaaggaagaaactggcctaagatcacaaagctagtaaatagtagagctaaatcctgcctaggcattctcatgttctggcaaatgccctaatcactttattttatattctctctaaaatgcctctttgcagtcctggagccacctaaatagggttctaacaccaagataaggaaagaaatatgtagaagctcacagataaacaaatcaagtatagagtcagctgtgattaagatttttttttcttgggaattgtttttgtttgctttatttgtagacacagggtctcaatgtgttgcccatgttgtaacgcagtggtgtgatcatagcccactgtaacctcaaaatcccaggctcaagtgatcctccaaccccagcctcctgaatagcaaggactacagctgtgcaacaccatgcccagctaattttttatttttattttttgtagagatgaggtctcactgtgttgcccaggttggtctcaaactcatggcctccagtgatcctcttgcctgggcctcccagagttttgggattataggcatgaatcactgcacctggcttgttttgtttttattggttaagagaatggactttggacacatactgcctgatcttaatttttaaataaagattgggccaggcatcatggctcatgcctataatctcagcactttgggaggccaaggtgagaggattgcttgaggtcaggagttcaagaccaacctgggcaacataacgagaccctgtctttataaagaatagaagaaaaaaaatagctgtgtgtggtggtgtgtacttgtagtcctagctactcaggaggctgagggagggggatcccttgagccagaagattgaggctgtattgaactatgattgaaccactgtactccagtctgggtgacagagcgagaccctgtctctaaaaaaaaataaaaaataaatacataaaataaaaattatatatattttaggtgtaaaacatgatgttttaatatatatatacatagtgaaattattactacagccaagctgtgatagtctgtttgaattgttataaagcaataccagaggctgggcaatttataaagaaaagaggtttattttcactcacagttctgtaggctgtgcaggaagcatggtgtcagcatctgcttctggtgagggcctcaagaagcttacaagcatgccagaagacaaagagagagcaaacttgtcacatggaaagagaggacagaggagagagcagaggaggttccacactgttttaaataaccagatctcgtgtgacctcagagcaagaactcaactcattactgtgaggagggcaccagccattgatgacccaagcactttacactaggccccacctccaacttgggggatcacatttcagcatgagagttggaggggacacacttccaaatcatatcacaagctaattaatatattcatctccttacatagttaccttttgtgtgtgtgtgtgtgttgagaacacctgaaaattttaaagccaatatcgaaatatccagcctagaatatagtattattaactgttgtcatgatgctgttcattagatctctagacttgattcatcctatgtagattcaactttttactctttgatcaacatctcctcaaatcccccacctccctgccccagtaaccattgttctgatttctgtttctatgtatttgacttttttagattccacgtataagtgagatcatgtagtatttttccttctacatctgacatatttcactttgcataatgtcctccctccaggttcatccatgttgtcacaaatagcaggatcttttttagggctaatattccattgacatacacatacacaccacattttctttattcatccattgacagacacttaggttattttcatatcttgagactgcttggattttaatcatagctctactctttattaactgtataaccttgattttttaaactcttggtattatgtttagctatttgttaaatggggttagtaatagtacctatctcacggggccgttaggaggattaaacaagttgatatctatacagtgctgagagtatctggcataccttagagtttaagcgccaagtggtagtagaagtagcagcagctgtagtagtagtaacagcagcagatggatacatatttgtagttcttacctttagctgctgctgataaaagattctatataataccgactaataatattacatatttgtagttctgatctttattttttgtttatttttgttgacacataataattatacatacttatgggattcagtgtgataattttcatacatgtatatgatgtgtaatgatcaaatcagagtaattaacatatccatcgcctcaaacatttgtcatttctttgtgttgcgaatattcagaattctctcttacagctttttgaaaatatgtaagaaattattgttaaccatatttaccctagagtgctatagaataccagaacttattcctcctgtttctccaatctagctgtagttatgaatttgtaaacccacctctccttatcctcccctcccctcaccccttcctaacctctgataaccacaatttactctacttctatgagctcattttttttagctcctacatatgagtaagaacatacagtacttacctgcctatgcctgacttatttcacttaatatcttccaggcttacccatgttgctgcaaataacaaggtttcaatatttttctatggctgaataatattccattgtgtatatgtgtcacattttctttatccattcatctgttgatggacatttaggttgatgccaactccttgtctattatgaatagcrctgcaataaacatggtgttggctgggtgtggtggctcacaccagtaatcccaacactttggaaggctcaggtaggagaatcactcaggccaggagtttgagaccagccccggcaacatagcgagaaccccatctgtacaaaatttttaaaaaaattagccaggcgtggtggtacgtgcctgcagtcctagctacttgggaggctgaggcatgggcgatcacttgactctaggagtttcagactgtggtgagatatgatcatgctactgtactctagattttctttcctttggataaatagtagtaggattgctggattatatgattatatggtagtaatatttttaggtttttgagaagcctccattgctgttttccgtaatgtctgtactaatttacatttccactaatagtatatgagtttcttctccacatcgtcactaacatttgttatttttttttgtcttttcgatagtaagccattctaactgagtgagatgatatcttattgtgcttttgatttatatttccctgatgattagtgatgttcagcattttttcatgttcttgttggctttatgtatcttttgagaaatgtttattcacaccctttgcctattttaaaatcagatttttttttttttgctgttgagttccttgtatattctggatagtagtcccttctcagatgaatagtttggaaatattttctcccattctacaggttgtctctatactctgttgtttcctttgctgtgcagaagctttttagtttgatactgtcctatttgtctatttttgtttttgttgcctgtacttttgaattcttacccataaaatctgcctagatcagtgtcctgaagcttttgccctatgttttcttctagtagtcttatagttttgggtcttatgtttaagtctttaatctattttgagttggtttttgtagatggtgagagggatctagttttttccttttgcatatggacatccagtgttctcagcaccatttattgaagagggagtcctttccccgatatgtgttcttggcatctttgttgaaaatcagtcaactgtaaatacctggatttacttctcggttctctattctgttccattggtctatgtgtctatttttatactaataccattctgttttggttactatagctttgtgtagtacatagcgtggtgcctacagttttctttttgcatactattactttggctattcagggtctttgtggttccatatgaatcttaggattgttctttctattcctgtaaagaatgttattggtattttgatagggattacattgaatctgtaggttgcttggagtaatatgtagttcttattttcattttatttatttggttaacttttttagagacaaggtttcgctatgttgcctaagctgctctcaaactcctgggcttaagcgatccacctgccttggcctcccaaaatgccaggattataggtgtgagctactgcacctggccttgtagttcttatttttaaatgctgctgaaagctattattaatgttattgttgataatactgatcaacattataaattttgaggagttaggtttagagtttagtagaaaattccttttctttttttttttttttttttgagacggagtctcccctgtcacccaggatggagtgcagtgggcgatctcggctcactgcaacttctgcctcctgggttcaagtgattctcctaaatcagcctcttgagtagcttctcaagtagcacctgacaccacgcccagctcatttttgtatttttagtaaagatgaggcttcaccatgttggccaggctggccttgaacgcctgacctcgggtgatctgtttgcctcggcctcccaaagtgctgggattacaggcgtgagccacggaacctggccaaaaattcttttgatatctgttgaagatgtttatggctgaaatcttttgagtctaaaccgcttgaccataagcacatctactgtgcccttggttgagtaccttaattttaagcctaatgctttgattgatttctccttttggttatgtagtatgctgatatatgttgatcattgattatggtctgctcattggtaaaatatagctgtatctataattgtatatctgtatctttatatctgttttatttttaagctagaaattgcatattttcttccttggctttaggtggtataactctacatatctctagaaatggaataatttttcataagtgggtgatttattactcataacattaagatataggcctctgacaatttctcataagtctgaaaacttcttgaacaagttaaatctctcaattaaatctagtccctcaaatgataacatttcactagtgtgacactgaatttttgtttgcaagaagatgtaagagatatatgtcatactaattaaacatgcataaagtaaatttaacagacatcaaagcacttttgcaatgcaaagaacatatggttgagctctaatatttgtttcttttcatggtagtctatgatgaaaaacatgacgtataaagtaattttatgtgctttctgaaaggttatgggaaaaaaaaacccaaaaatacataggtaaaatgatttgtattttcaactttatttttttcttcctaacataaaaataggataagtacttataatagaaatataattattataaaatgtatagttttagtgagcatgaatgtttctcctttttgtatgttaagtaaatttttagtaaatttctcatggatttctagcattaaataatacatctaggttttcagagaacaaggactaattatttccawgaatgtaatataagaaaaaataatggggatatgagtagaggtaatttatttaaaaaatgggatttttgggtgtcataggggagtaaatatttttccttgtaggaaattactttggtttctgctgtaacatttcttagtctttgcaaagtgacttattataaatcataaaagtattttctgtagattttgggataggtggtttcatgaaaagtagaagaaaaatagtttcatgtgtattaatgtcgtaagttttaatatttattatacagcagcttttgaaatgagtttattgccaaaacttttggataaagtaattgaaaaaaaagtagtccatatattagaacttttcttatgctgacagatcatatgcctcacttttttwwatatttttttatttttgcttttttcttcagaccaaaatgcctcacattttatctgttgtattttaatctagaccttgtaataatcttgaataaggtaaattgatagacttgggtaagtaacttttttgtgaaaaccagttccttcatatggaaggaaaaagaatgggagactagatttaatgatgctttatttatttatttatttatttatttatttatttatttatttattttttgagagggagtctcgctctgtcgcccaggctggagtgcagtggcgcgatcggctcactgcaagttccgcctcctgggttcacaccgttctcctgcctcagcctcccaagtagctgggactacaggcgcccgtcaccacacccagctaattttttatattttagtagagacagggtttcaccgtgttagccaggatggtggctcactcctataatcccagcactttgggaggctgaggcgggcggatcacgaggtcaggagatacgttatatctaattgaattctaacacctttaaattctaaggacgcttttcctrtcttgctttttattatatgatactagggagtacagtattttttaaatagaaatatttatttggattcataaattaatggtttaattctcatccctgcaaaggtgtgtcttagtcttcacgtttttcaaatctgcagttgcattacttttgacaaaccttcttccataaattaaatggtaaattagtttgatgatttctgttttcccctgaatttgacattaaactttttaggttcttcaaattttcttagtttttatgaaaatcatttagtttccacctagtggattggagaagtagattgttgtctctttatttttctatcatttctagtctcctaactctcttttcaagtcggaagatagtgtcagtaccttttcttatataattaactttctggtgtcccctgcttgatccctttccttacagttcagatttattttcttaatctgacaattcatatgtcaaagttctagtgaagcatctgtctccacatggtcaaaatatagttaagaaaaacattgttttttagaatagtatgttaacgttttgatattactttgttctatcattcataatcattttctctagatttatttatattctgttctttttttagtaaatcctcacaatagccagggttgtcttcagatatattcttatgcttatacctgctttttatttattcattaaataaatgctaacattctttatatactttaattaaagtaattatatttgatttaatgtagcagtagcatattattttaattcataacttgggcctggtgtgtggaagacacttgggtccagcagagtgcgctgttgaccttcttacaaagtgttaacactggggcgatccttaggctatttttcttcctttttcttcctcccataccccatttttatttccttccttcctacccttctttcttttactttatggttttaatttacttttatttaaaatagctatttaacataactgcatatatatgctgatactggtgcttactgtgttatgtgccagacactctgctaagcactttagaaatattaattcacctggcaaatacaggttcatgtgagttgatgcttattgtcatgttcttttaacttttctttgggtttgacagttttcaaaataaaagaatttaactcaatctttataacaaccgtatcaggaaggtattaatattttccgcaattatagctgaggaaactgagccacagagtatttgaataacttgttcatgtcacaaacctggtgagtagaagctggattaaaacccaggcagtctggctctggaattgatcctctaaaccacctcactattctgtctctgaataaactcttccagatgactttttgatgacagttcatttttatactgttacaggtcatattatatgcattaccatgcaggttatttattcaagattcgtcccttttttagtgtctcaacaccaaatctaagcatttacaatgcttacccaaatttataattatttatttatttgtaggtttaactgttttttgttttgtttgtctcattaccagactgaccataaggacaagtgtaatgtctctttttttcagttttttataaccagcatctggcacagagcctgcacctagtagctacttgtattatttgttgaataaatgaatgaaaaaaatggccatagttaagtagatgtatgattcaccactgtttcttgtagcttacaatttttactcagatccttatacctaagagggtatgacagtattgttaaatacaggtgacttaatgcagatttaaaaatagtttttggccaggcatgatggcttatgcctgtaatcccagcacttggggaggctgaggtaggtggatcacttgagcccaggagtttgagatcagcctgggcaacatagcaagaccctgtctctacaaaaaacaaacaaacaaaattagcttggtgtggtggctcatgcctgtggtcccagctaccaggaggctgaggcaggaggattgcttgagcccgggaggtagaggttaaagtgagctgtgatcatgccactgcattccagcttgggtgacagagcaaaacctgtctcaaaaaaaaaaaaaaaaaaaagagtaataacattttttgaaaaacctttaacattataaaaaccaatacagaataaaaattaaaatgttctcccttatgttaaccccatctccctttctgctttccagaaggaaacaccatgaacactttcatgaggatctttctagatccgtttctataaatttataaggatatttttaatagttcttttacagttttgtttgtgcatttaactctcttgtttatgggatttattttcatgcatgtatgaggtcaggctctaattgcatattttcccaaatagttgatcagttgtcccagtgtcacttaatmatttttccagttttgaagttttgctgttatcatgtactaaattgttatatgtacttggattggttcctggacttttttttctctttaattttttttttttaacagtatgtgtgaaaaaatatgtcaaagaattccacttggcttcaaacagaaaagcagtagacccctgccctaattctattattcaccaattcccactatctgaagtaaataattttcaattatttatcctttgtattctgatagtttttgaagtagcatgcatattttgcttttctcttgagttttcggttttagatactttctgttgtcttcctcctattcttttctcctttctcattacttctacccttcagcctgccagcatttggtatttgtattgttataattctataaatatttaaacttattacagttctttccccaaaccagtatttattttttttggtgctagtagttgtcttgtcctttgcttagtttcctatgtacctgtaactatttatctccaaactctctgttagaaagtaaaatctatcagttcatttaaatacatcaggtcaagatgtccatatttttagactttcaatatttagtggaaataatgaaaaatactcttttatattgaattaaattttatatttctaaataacttttttctgaatataaaagcatcatctaagagaaaatttgggaaccaccaaaatgtgtacttaaattattaacattaatccttaattaaactgtctcctcaatatcaacccctgatattctgcctgctgtctattcttaagtgcgcacatgtgcgtgcacacacacatgcaatgttatctgttgctgtaacaaaccaaccatttatttagcttactgttgtgggggtcagcaatttagggtgggctcagctgggcatttcttctgctgatctcaggtggcctactcatgtgtctgtggtcaactgcaggtcagctgtaagtcagcaaggcagccctgcttcagggagttgattggtagtcagctgggaccatgaggtgggtctctctcatcatctagcaggctaattctggtttatgtatatggtggcctcagggttccaagagcagcaagagaacaagccccagtgtacaaatgccttttgagtctgtttgtgtcaggtttgctaatgttccagtcaccaaaagcaaatcacatgaccaaatccagactcaaggggtaaagctcacatcttggtaggaagagctacaaagtaaccttgaaagggagcttatatacaaagataagtagaatttgttgccatttttgttacgtagtatatattacatatatacccagtatcaactgagtatatatgtaaacatttccaccatagagaacactactatgttttctccaggctctyaaaaaaatcgtaattattgggccgagcgtggtggctcactcctgcaatcaggtgttgtacagagctcaacccctgtaaaggggttgatactgtagtatatattacatatatttgttatgtagtatatatgacatatattacacatatattacatatatactccctccccacacacaaaattaggattatagtatatagcttttatttttcacctaatatatcacggtcatagtaaaatttagcaggtctattttgatggatacttttttgtcgtaatcttttttcctatgccagtggttggcaaactatgacccatgggcagaatacagcctgctgcctgcttttataaataaagtttttttgaacgcattttacatttgtttatacatattgtctgtggaacttttgcgttataacagtaaagttgagtagttgtgacagagaccatatggctcacaaaacctaaaatatatactctgtctatttatgtatttttcttttctttcttttcatgttcagccagcaggaaaatctctggccttttagagaaaaagtttgccagcccgttctatactattgtaatcttggttaagttaggccagaggttagtggagttagtgtgaatctcttgccttgtctgcaaatttgcctaggggtaggatgatagaatggatgactaattgcttgagtatgtccttcagctccaataattatggctttttttttttttttttgaggtggagtcttgctttgtcacccaggctggagtgcagtggtgcagttttggctcactgcaacctccacctcctgggttcaagcaattctcctgcctcagccgctcgagtagctgggattacaggtgcctgccaccatgcctggctaatttcttttatttttagtagagacagggtttcgccttgttggccaggcatgtttcgaactcccaacctcaaatgatccgcttgccttggcctcccaaagtgctgggattacaggagtgaaccactgtgcctggcccagtaattataattttttgagagcttggagaaaacatagtattctctatggtggaaatgtttaattctcaaaagtttcaaatcttctttatcatattgagtgaacttggtgaatatttcagagaaagttgacaaaattcagccactcctctaagttttcttgatgtgtagatacattaatgaaataaatatgtatagcaacccatccgacatgagtgtagctattcagtggtgatagtatctgcaattgtcatgtagaacgttttcattcatggatactgggtgtggaaagataactttacctttgaaaactacttcgttaattgaccaactgtctgcccagtaaatttatctttcggttattttagctttttaaaagtttggctgtcacaaaattatagagaaattggaagtacaatccaaatatctttttttattgagccatttaagagtatgttgttgccctgatgttccctcaccctgaaatactttagtgtctatgtcttataagcaaagacattcttatacataatcacaatataaccataagaatcaggaagttaaaattgattcattgttgccatctaatactcagaaccggtttaaattttagcagttgtcttaataacgcttttataaaagcaaaagaatccagtcagaaccatgcattgcatttagttatcactttagtaacttcttcagtctggaacacttcttcagtctttccttgactgtcatgattttgacacttcagaatattacagcttatctagaatgtctcttaatttgggttttctcattagactgaggttatttatctttggcaggaatgtcacagaagtgatgccttctgctcattgcatcttataaggtggcacgcagtttcattttttctcattaatgattgataacttgattaatatgatatctgctaggtaaaaaatataactttacagttatctttttgcctttataaaagaggactttatggggaagaactctgaaattatataaataacatgtccttacaaaaattcagtttactcattttatttatatctttatggacttgtgattttccattttattcggtgagttataattattatatgatttgttttggtactcaagtgggaaaccagttaagttgcttgtgtctttctgacatatatcaatcattcttggaacgcttccttattttttggcaaaagatagtgttccaggctcaccttatattttccctgccctagtctcggattcagacatttctccaaggaaccctggttccatttagtgaaaaataacatttgaacgctgtgttctgggagttagttttgctcattgctgttggagttgctgctccaggccctttcagcagacagctagagaatatacacaatgtattgtgtacacaaacccagactcatagacatatacatttatgtctatattttttctgtatctgtctgtctgtacactgaaaattatgagtgtttataccaatacatccagttccattccagtaccagagggcccattctaattttcttcctttctgtatgtttaactgaaaaaccttgttcctgattcctctgaaagttaaaaacagaattaccatatggtccagaaataacatttctaggcaaatatccaaaagaattgaaagcaggtactcagatacttgtacaccagtgttcataggagtgttattcacaatagccaaaaggtggaaacaaccaaaatgtccattgataaataaacgaataaacaaaatgtggtgtatacatacaatggaatattattgagcctttaaaaggaaggaaattctgacatgtactacaacatagatgaaacttgaagacattatgtgaagtaaaataagccagtcataaaaggacagatattgtatgattccacttataatttccttccagttattcattactattatagaagtagaattcatttttgtatatttaccctgtaacctgcaacttgttatatcacttattggttctagttgatatttttggagtttctttaggactttctaagtacccaaagttgcatgtttcattctctagtaaatactgttttacttcttcctttacagtgtttacctttcatgcagtacaaggctgaattagagtgatgagagtggatacccttgccttgttcacaaccttgtggtggaaaacattctggtccctcactgttctgtatgacatttgtgctaggtgttctgtctatgccctttgtcaggctaaagaagtttccttctatcgctagttggctgaacatttttataatgagtggatgttggattttatatttaaagttttactgcattccttggtaggattatatgttttttctcctatatcctgttgatatggtaaattacattgattagtttttgaatgttggcctgactgtaaattagtggaataaaacccacttgatcatggtataggacccattttatataattgttagatttgacttgctaaattttgttaaggattctttccatctatgttcataagaatattggtctatagttttctgtaatgtctttatctggctttgatatcaaggtaatgttggctttataaaatgagttgggaagtattgatattacttcttccttaaatttttgatagaattcaccagggaagccatcttgcccttatgtgttatttttgggaagacttttacttttaaatttaattttaaaaatgagtataggagtattcacattttctgtttctgagtcagttttagtaattagtatcttycaataaatttgtccattcaagtttttgaatttattggcataatgttcaaaatattctcttatttctttaagtgtctgtaggatttgtagtgatatgccctctttcatttctgatattcataatttgtgaatttgtgtctatctccttttttttgcttaatctagaattcattttgctcaatctgtaataggtagtagaggtttatccattttattgatcttttaaaaagtttttgttgactttctgtttttccattttctattttgttggtttctgcttttttttttttttaattaccattgttttactttctttggatgtaattttctcttctgctagcttcataagattgaaacttggccaggcatggtggcttacccctgtaatcccagcactttgggaggctgaggcgagcgtatcacctgaggccaggagtttgagaccaggctggccaacgtggcaaaaccctgtctctattataaatacaaacaattagccaggcatggtggtgggcgcctgtaatcccagctactcgggaggctgaggcaggagaattgcttgaacccaggaggcggagcctgcagtgagctgagatcgtgccattgcactcaagcctgggcaacaagagcgaaactccgtctcaaaaaaaaagaaaaaaaaaaagattgaaacttaaatagttgataactgattttggacctttttttttcctaaataaaacaccaatgaaagctatacatttccctctaagcacttctttatctgtgtcccacaaattttgatgttgttacatttttttctgatttcccttgtgatttcttctctgacccaagatttatttagaagtctaaataaacactaactaggtgttttttcctagatatttttctcttactgagttctaatttatttttgtgtggttagagaatagattctatatgatttcagttcttttaaatttgacgatctgtcttggcaaatgctctgtgagtttttggaaagtatgggtattcatttataaaaatcagttaggtcaagtttgttgattatcttgctaagatcttctgtatccttgctggttttttttggtctacttataaattaattagagaatactgtaagggtcctataattgtggatttgccttttctttcaattctaccagtttttgcttcatgggttttcatggtctgttattagctgtatacacatttaagattattatgtcttcttgatgtattaacccatctgtcattatgaaatgtctttgttctgagatctattttggctaacattgatatagccactccagctttcttaggattaatgtttccatagtatatatttttcatccttttatttttaacctatttgtgtctttagatttaagataagtttcttataaataattgtcttctttatttatccaatctgacaacctcttctttttaattggaacacttatactatttacattyagtktaattatcactgtggttactatttgttttctgtttgttccaacttttctttattccccttttctgtcttctttgaattaattaaacatgttttaggattctactttaccttcaccactgtcttcttaagtatacctcttagttttatttttgtgagttgcttcatactttgcatcttaaacttatcacagtgtaccttcaaataatatttcaactcacaaataatgtgtaagaaccttctgccaatatacttccgtgtctactctcccatgttttgtgccatttttgtcaaatattttacttctacatttgtcatagccctcacagtgttttgttatttttagtttaaatcatcagctatgtacaaatttacaaatgaggaaaataatttctttcttaaccctccagtttttcacttctggtgcccttcattttgtaggtccaagtttctgtattgtgtaacttttctattagcttaaagagctttatttaacatttgcattgcaaatattttttcagctttttttcttaccttcatgtttttaatggtaaaatatatataacataaaatttaccatttatctgtttttaagtgtaaattcagtggtattatgcatatttatatactattatctagtgccagaaccttttcatctttccaaactgaaacaccatacccatgaaacaatatctctgtatttccctattgtccagccccaggaaaaatgccgttctcctttccgtctctatgaatttgactactctagatacctcatgtaagtggaatcatgcaatatttgtccttttgtgtctggcttattttactcagcataatgttttcaaggtcatccaccatgtagtatgtgtcagaattttatttctttttatggctgaataatattccattgtatggatataccacattttgtttgtccgttcatctgccagtggacatctgggttgtttccatctttttgctattttgaataatgctgctgtgaacattggtgtacgtatctgtttgagtctctgttttcattcgtttgggtatacacctaagagtggaatttctggaccatatggtaattctatatttaagtttttgaggaactgccaagctgtttttcacagtggctgtaccattttacagttccatcagcaatgcacaggggttccagtttctccacatctttgccaacctcattatctgttttgttgtcctttttaaagaatagccatttttaagggtgtgaagtggtatcttgtgtttttgatttgcatttccctaatgattagtgatgttgagcatcttttcttctgcttattagccatttgtgtattttctttggagaaatgtctattcaagtcctttgcccttttttgagacagggcttcactctgtcgcccaggccggagtgcagtggcactatctcagctgactgcagtgtccgcctcccaggatcaagcagtcctcccacctcagcctcccgaatagctgggattacaggtgtgtgcccccacgcctggctaattttttgtatttttaatagagatggggtttcaccatgttggccaggctagccttgaacttctggtctcaagtgatcctcctgccttacctctcaaagtactgagattacaggtgtaagccaccactcccagccccattttttttwaatttaatttttattttaagttcaggggtacatgctcaggtttgttatataggtaaacttgtgtggtagtggtttgttgtacagattattttgtcacccaggtattaagcctagtacccattagttatttttctgatcctctccctgctcccaccctctaccctctgataggccccattgtgtgtttttcccctttatgtttccatatgttctcatgatttagctcctacttataagtgagaacatgcagtatttggttttctgttcctgcattagtttgctaaggataatggtctccagctctatctaagtttctgtaaaggacacagtctcattttttttatggctacatagtattccacagtgtatatgtaccacatttttaaaatctagtctaccattgattagcatttaggttgattccatgtctttgctattgtgcatagtgcttcaatgaacatacgtgtgcatgtgtctttataatagaacaatttatatttctttgggtatatacccagtaatgggattgctgggtcaaatggtgtttctgtttttaggtctttgaggaattgccacactgtctactgtcttccacaatggttgaactaatttacattcttaccagtagtgtgcaagtgttcctttttcctttttctctgcaacctcaccggcatctgttttttttttttttttttttttttttactttttaataatagccattctgactggtgtgagatggtatctcattgtggtggttttgatttgcatttctctaatgatcagtaatgttagcttttttccataggattgttggctgcatatatatcttcttttgaaaagtgtccattcatgtcctttgcccactttttaatgaggttgtttttcctttgtaaatttaagttccttatggaagctggatattagacctttgtcagatgcatagtttgcaaaaaattttctcccattctgtaggttgtctgtttactttgttgatagtttcgtttgctgtgcattaactctttaattttattgggtgtcatttgtcaatttttgcttttgttgcaattgcttctgttgtcttcatcatgaaatctttgcctgttcctatgtccagaatggtattgcctaggttgtcttccagggtttttatagtttttgttttacatttaagtctttaatctatcttaatttttgaatacggtgtaaggaaggggtccagtttcaatcttctacatatgcctagcgagttatcccagcaccatttactgaatagggaatcctttccccattgcttgtttttggtaggtttgttcaagatcagatagttgtaggtgtgaccttatttctgggctctctattctgtttcattggtctatgtatctgtttttgtaccagtaccatgatgttttgattactgtagccacgtagtatagtttgaagttgggtagtgcgatgcctccagctttgttctttttgcttagggttgccttggctttttgggctcttttttggttccatatgagttttaaaagagtttttcctagttctctgaagaatgtcagtggtagtttaataggaatagcattgaatctgtaaattgctttgggcagtatgacctttttaatgatactgattattcctatccatgaacatggaaggttttttcatttgtttgtaagaaatctctgatttcttcaagcagtgctttgtagttccctttgtagagatctttcacctacctggttagttgtattcccagttattttatttatttatttatttatttatttatttatttatttatttatttgtggcaattgtgaatgggattgcattcctgatttggctctcagcttgacagttgatggtgaattggaatgtcagtaaattttgcatattgatttagtatcctgacaagttgtttatcagcttaaggaggttttgggctgagactgtggagttttctagatataggatcatgtcatctgcaaagagggatagtttgacttcctctcttcctatttggatgccctttatttctttctcttgtcagattgccctggccaggacttccaataatatgtttaataagagtggtgagagagggcttccttttcttttcttttcttttcttttttttttcgttttgagacagagtcttgctctgtcgcccaggctggagtgcagtggcacaatcttgggtcactgcaagctccgcctcccaggttcacgccattctcctgcctcagcctccctagtagctgagactacaggtgyccgccaccttgcccagctaattttttgtatttttagtagagacgggatttcaccatgttagctaggatggtctcgatctcctgaccttgcgatccgcctgcctcagcctcccaaagtgttgggattacaggcgtgagccactgcacccggccgggcttccttttcttgtgctggttttcaggggaaatgcttctagcttttgctcattcagtatgatgttgcctttgtccattttggaattggattgcttttgtcgttgttgagttggtggaagttctttatgtattccagatattaataccttattggatacatgatttgtaaatattttctcccatttggtgtgttgcatttttactctgttgatggtggtctatgatacataaacgtttttaattttcatgagtccaatttatctcatgaagtccattttttatcaccagtgcttttggaaaagttttatggttttagcttttatatttaaggttttgatccmtgtagagttaatttttccatatattataatggtgcaacttcattgtttgtgtgtagatatccaggtttccctgcaccatttgttgaaaaaactgttcttttcccattgaatggtcttgataggctgctgaaaattatttgaccatatatgtgggggtttgcttttggaatttctattctgttccattggtctatatttctgtttttatgccagtaccatgctgtttttcttactgtagctttgtagtaagtttagaaatcagaaaatgtgagacctccagttttgttctttttcaagattattgtggttattcggggttccttgagaatccatgtgaattttaggatggtattttctatttctgcaagaaacttcattgggttattgataggaaccgtcgctttgttttgaaacacattttcactgggtattgaagtttaggttcacattttctttctttcagcacttaaaagatattctgcccttggcttgtcttacatagtttctatagagtaatctgtggctgctttaaaaattctatcttaggccgggcatggtggctcatgcctgtaatcccagcactttgggaggctgaggcgggtggatcacctgaggtcaggagtttgagaccagcctggctaacatggtgacaccctgtgtctactaaaaatacaaaaaattaggcaggtgcggcggcacatgcctgtaatctctgctgctcaggagtctgaggcaggagaatcacttgaacccaggaggcggaggttgcagtgagctgagatcactttgggcaacaactgcgaaactccgtctcaaaaaaaaaaattctatttttatctctgctttcagcaattcaactaaggtgtgtgtgtgtgtgtgtgtgtgtgtgtgtgtgtgtgtgtttattgtgtgcttggggtcattgagctttttggatctatggttttatagttttcatcaaattatgaacaatttgagccatttaaaaatattttcttaagtactcatttttttcctttcagacttcaattatgtgtatattagacagcttgatattatacatcactgactatatgttcattttttaagctattttttcttctttgtgcttcattttgtctaccttctattgccgatttgtcaagctccttgatctcttctgctatttctaatttggtgttaaatcttactagtggatttttcttttcagttattgtgttttcatctgtagaagtaaagtaatgtagttatcacctctttgtttccttttctctgagatcacaattcagtgtctgaaaagtactgtttcatatatcttgtccaatttgttagtagtttatggtgcaagataagatttctgttttttcgtatggctaaaagcagaaggccatacaatcatatttttaaggacatttattgtttctttaaatgttggccttttggaaaacttaaacaaatatatgcattgttctaagtgaaaactactataagccagatgttgcattacttgtgcaaggttaacgtttcattcagaagataattgatattgacaacagcattggaaacatgtatgaatcttttaaagaaagatgcttttgaggtttagtgaagtaggcacacatcagggcagtaaaaatgtcagattctccttgttactcagtgartctggagtaggagaagcagtcaccatcctggggtacttcatgatctgtgttgatgatctgctattttgaccatagttcctcagccttcttgaaacttacgacctaatttagccattaattcaacagcaccactacacatgggacttcgttgtcatttggaaccgtcccacctttaaactgaaaacttgttggtccccatattagtcatacagggcctttttttttttaaacacaaacttttccccattcacatcccactacacatttacacatcactggatgtttgtcaattatttttcctcctttctattgattcttttccttagctataaccatgttatgttttctcctgtccttccacaaggaaaccttgtctcagctctttccttaatctaatattctgaacaatagtagatgtgagagcagtctgttttcctattcagtcatctcattaacctgtatgattgatttgactggccttactggatagtctgtccagttccctttcttccttggygctttttggtgcatttttcccagagggcacataactggatctattagtacgacaaaaatcttatcaaattgagtaaaatgattctgcaagccctgaaaaactagttacttctccttttggtagtatctctaccctgtatattgttttcttttctgtgtatgtttttaaaaaatgtaattgtttttataaaagtgatatttgcttataaaaattctagtaacatcaaagattttacagaaaaaaatgatgagaatcccattatcagtctattcgtcaaatagcttttcttcttcttttattgtcttttattttttgtcatttactaattttatgtaacgcttatagggaagacatttcattcattaatttatatttttcacatcaaaaaccagtcacacgaggtttttattatgtcttctgtcatttagttcttttactggtggctattactgattcttctgacaatttttagtcattaacaaatgttttcatgtgcagttttagttaatgtgagatttatttattttgttgcttatttctaccagtaatattcattgagccttcaatatctgctgagaatgaaatggtggcctgatgtggtgatattcacctgtagccccagctacttgggaggctgagayggaaggatcacttgagccgaggaggttgagggttgagaatgaagtgagtcataattgtgccattaaactccagcatgggcgagagagagagagagatcctgtatcttaagaaaaattttaaaaagacaaaaaatgcaaaaagtagccaggcgtggtagcatgtgcctatagtcccagctactcgggaagctgaggcaggaggattgcttaaacctaggagttcaacgttgcagtgaactatgattatatcactgtactccagcctgggcaacagaatgagaccctgtctgtaaaaaaaaataaaattaaaaataaaaaggtaaaaaatacaagaaaaaaaaagagaatgaaattgaggcaggagaatagggtctggaggcagggaacctaaggccgattcacactgacttcctaaaactgaatcaaaaagaaaaactcrcctctccacccccaagtaacaaaaggatcagaggctactctgtttgcaacaccctgcctttctactgaatggcaggttaaagaatggaaagtacctctccttcccacaaccagtcttcatgtgcatagggtgtaactctgtaacttcacttcagcctctgattggtcccctctcacaaccaatcagactggtcatgggccatgtcttcctttgcataggatgtaactgtagcttcccttcagcttctgattggttgcctcccacaaccaatcagactggtcacaggccacgtgtttatttacatagtgtgcaacaaaataaccaatggaaacctctagagagtatttaaactccagaaaattttgtaaccagtgctcttgagcctcttgctcaagccccctcccactctgtggagtgtactttctttctttctttytttttttttttttaagacagagtctcgcttcgttgcccaggctggagtgcaatagcgggatctcagcccactgcaacctccgcttccctggctcaagtgattctcctgccccagcctcccgagtagttgggattacaggtgcatgccaccacgcctggctaatttttgtatttttagtagagacagggtttcaccatgttggctaggctgattttgaactcctgacctcaagtgatccactcccctcggtctcccaaagtgttgggattacaggcgtgagccactgtgcctggccctttttacacttttgtaaccagggttggcaacttaaatgagcaccagataggtagcatgaatgaaagaaggggtctaagtataagtgcatgtgattacattctttaagtggcagggactgtgataccttgagagtatatgtctcatccaaatgtggcaatctagtcaatgttagtggattgctgtcctgtaagaatacaggcctaatgtggccagtcaaccagtttttctagaagaaaccagcactatggattttcatctcataatttttaagtagttcaaatttataaaactctgtgtagccattcaaaacatgattgtgaagcaggtatgatttgtggacctccagtttgcaacttcagctactaagtaagtttattttagtggtgttttaggtgggaaggagggcaaatgtgtgtacctaatctgccatattagactggaagtctcgtggtttcagttcttatatactgatctttaattcaactgtaaattattttgatgtaaggtgggagataggatctaatttttttccccaaatagtcattcatctaaatattagttgaataatttcycccacagatttgaaatgccacctgatttaaacagggtggtttgctttttttttttttaatttttaattttggtgggtacatagtaggtgtatatatttatgaagtacatgagacattttgatacaggcatgcaatgtgtaataatcatattagggtaaatgaggtatccatcacctgaagcatttatcctttgtgttacaaataatccaattatactcttagttattttgaaatgtacaattacattattttttactatattcaccctgttgtgctagcaaatactaagtcttatttattctttctaactacttttttgttcccattaacaactccactctctcccctccctagactaccttgcccagcctctgaaaaccacccttctactctctctctccatgagttcacctgttttaatttttagctctcacaaatgagtgagaacatgcaaagtttgtctttctgtgcctggcttattttacttaacataatgacctccagttccatttatgttgttgaaaatgacaggatctcattctttttatgactaaatagtacttcattgtgtatgtgccacattctcttcattcattcatctgttgatggacacttaggttgcttccaaatcttggctattgtgaataatgctgcaataaacatgagagtgcagatatctcctcgatatactgattttctttcttttggatatacacctagcagtgggattgctggatcatatggtaattcaatttttagttttttgaggaatttccaaattgttctcgatagtggttgtactaatctacattcccaccaacggtgtatgagggttcccttttctccacatcctcgccagcatttgttattgcttgtgttttggataaaagccttttttttttttttttgagacaaattctcactctgttgcccaggctggagtgcagtggcatgatctcggctcgctgcaacttctgcctcccgggttcaagtgattctcctgcctcagcctcctgagtagctgggattacaggcgtgcaccaccacacctggctgatttttgtatttttggtagagattgggtttcaccaagttggccaggctggtctcgaactactgacctcaggtgatctgcccccctcggcctcccaaagtgctgggattacaagtgtgagccaccgtgcccagccaataaaagccattttaattgggatgaaattatatctcattgtagtttggatttgcatttctctgatgatcagtgatgttgagcaccttttcatatgtctgtttgccatttgtatatcttttgagaaatgtctattcaaatttttggcccatttttaaatcagatttttaagggagtgatctgctttttaagaaatagaaacccgctaaaagaaagatcatgcaggagatataattcccctcattggaaatgaaaagtttttaggcagcttctctgttctctttggggcctctggtgtgacatctgcatttctcagcaaagttttctcattattttttgtagattggtttttctagatacttacactctttcatatgaccttaccatgacatctcaaagtggaagcctaaaatctaccaaatgatgtggcctattttctgtaattaatcaactcagtctaaatgccccaaatacaagttcttgggaaagtgaaactaattgatcttgctatgcctgagagtgtctttggatatgtgttattaatgtggatattaggttcagcctttcagcaggggatatagatgatttcagagtaagtaggtggacacatgtccatagaggtgcctaatacagcatctttatcatatatttgaaattcttacatctatagaaatatataccctacttgcccatctttcccccccctcccccctttttagagatgaggtcttgccatgttgcccaggctggtctcgaactcccaagcacaagtgatatgcctgccttggcctcccaaagtgctgggattacaggtgtgagagatcacacctgtccccatcttatttttccaaaaagttttggttattctcacttatttattttcaagattaaatttagattacccaaaaaaaaatcttgctgggattttgattggaattcagacaaaaattagaacaaaaaagattaagaaaagtagtttactagtctacaaaaattgtgaacccagttttcatgagctgcaacctgcagaacccatttttacctatgagcacacaatttttacagtgtacttttgctttttcctttctaacttgaatttacgaagagaatttctcacacatacaatgcacctgcaataaccattggttttctagaatctctgataatactttaaatgtattctgtccactagccacatgtatttatgttttttgattaattaaaattaaaattcagttagttgtactaattacatttcaagtgcccatgcggctaatgccaaatatattgaatagtgcagatatcaaatacgctgtcatcacagaaaatcctgttgggtagtgctgctttagagacttgtatgtaataataaccatttaatttttaaagcccatagaagcacaaatctctatgtcatatgttttgtttatagcattttggttaatatgtggaaaatgacatgataggatagcattgttttctcattttaaaaggttcattgaagaaagtttgaaaaataccataaaggagaaagtaaaaattacctgcaatctcaagagatagggttttttttaaaagcctttttgaaatacaatctataaccaagtgtacatatcataaattacaattggatgaattttcaccgactaaataatacatatatgtctttttaccacagtttctctattcccaggttctttttgattcatgtcttgattgtttggatttaataatcatgtagttttattgaagatgggcacaagagtatatttcttatatcaggaggcatatgaagccagttagtctcaataccattgatgctgaatttcaccacttggttagagtgtcactgccaggtctcttcattgtaaaggtacattttccttttgtaattaatgaataatctgtggggtgatattttgagactttgtcaatattctgttccctaataacttttcactgaaagatttcagcatccatttatgtaacttgcctgaatcagttagtacaggaaagttgcaaaatggtgatttttaaaattctatcattttatttacaattcttagctggcattcttatttaaagaagatattttccgcctacccgcccacttccccattttgctcgtttgagtcttctttttcccctttttattttttataaacaccctgggtttttctcatgaagttgatcggtgtgactcatcactgctttgagactcattgctataatcacatctatgtaaagttctattataccaggataatttttgctttatagcaggtcagtcatctttatgatatgcttgttcttaaactgataattcttattgatttactctattgaaacacagacttttcagaaactggagcaactgtgttaaggaattcccatttacactaggcaagaaagtaaacagtaagtggagagtagggtaacaaacacttatggtatcaaaaaacaaccgtgaaaaggatctgtcttaatgtgctagcccactgcagtttaacatattgcttacaaccttcacaatagaatttgagtgacttcagttacacattccaggagactggcagtctgttacaatcagagtctgaactttagagcaggctaatttacagcgatgggatgaagaaagttgtggatttgtattacacactctcacctgacactgtatctgatcccctacctgctgattgacatcttgaatgagctctttgaagcaagttccagcttaattaaaacgtttgcttggttagcagtgatctrtgaaagcctgtgataaatattgaatcaggttcacctgctggttgctgtgagtggataaacagctgctttgtgcagtctaatcatgaaacggtggcagtagggtactactactgtttgaatttttaaaaaaagaatagttgaaaaggtatagttatgttacttttgctatcttactagagtgtgtgctaatgtgagattttgcacaacgggcattcagtacctgtttagatggcttggacaacagcaaatggttgataaagattaamaaacccttttttatgtctcaaagtttgtagtataattctatgttcattggccttttaccactagctcttcatatgcatgactttttgaaataaagggcagtgttttgcttttttgcttaagtggtagatgaaaacaatcctgttaaagcttcactttaaagatttaaggttatgaatttcaacttctccacaaatttattgtgtattttgtgggaatttgaattcttctgaatttccttttttatctgtaaaatgaagttagaaatatacattagtgaactgagtattttagccttatgttaatattaggtaattaacaaacattaaaatagaaatgagttcagaagcagtggaggaaactttatgaaattctcttggctgttgtttattcctttacagaataactatgtctggctaatttggttataaagaaaatgttgtttccatttgattttcgttaaaaaaccagatataaattctggaataaagccctaacccaaatcagtcacaatctgctttgagcacttgattaaagttaggggttcactttctaaaaatgcacacaaaattgtgtctgtagtttctgggtgatctgtaatagcccatggaccctaatttgagaacccatttcctaataaattaggttgaaaacttttgaggaggaggtgttaagatgaaagctattctgctgggtatgaaacaactgaggagaaaccagaacagagtatatttactgtgggtttttttttttttttccagcacttctagcatttttcaggtatgtttttcatgacaattgttagcttttaagattatcttccatagtcttgattcctcactctctacctgaagttttatatttttatttctatcatcaacttatttagaattttatggggaaaatacaattttgtttaagccatactcagcctgttcaactgcttgttcatgtttatcgatgtcgatgcatacaactgtcattcatatattttcattataatattattccattgattggaaagagcccacaatttactcatccattccttctgttgatacatgtagcttgtttttctcactattaaaacaatgctgcaattaatattcctcttgtatctgtcttaatgtgcaagagtttttctagcatgtatacctaacagtgtcatgctgggtcaaagggtatatgtatctttgatttcactagatcaccaatttgctctcaagtagttgtgccaatttatacttcgatcagcagtgaataagagtttcttcatatcctctccagtacccaatctggtggataggaaatggaatctaattatggttttaatttgcattttcctaattactagtgaagctgtacattagatggcacatcttttcagatatttattagcctttcagcttttctcttctgtgatttgcctgttcttggttttctgtagggtttgtcttttaaaaatagatttattggaattctttatatgttgtagatactgatcctcacttgactgtaagcactgcaagtatcttctgtcagcctgtgccccctttttacctatttttctttccttctttaaggaatatgtatctttaaatagaagtttaacatgttaatgaagctgtgttttcactcatttgtgtttttggtttattgttttaggaaatccttctctacatttcgatcataaaagatatcttcctatggaagaagagaccatatagcctttgaagcttgaaatgtttactgtctggctcttttgctgactcttgctctaaagagtctattaattgaaagtttktgttttttatttttcccttgggggacataatatggatcttgttataacatatttgatttaaatgtcaactaataagttaaaacaatttttatgaagatcatacttaggaatattttgtaattgcattcataaaataatakaactaactttaaacaattccttggtttatgagtgaaaatggtgtgataaactccaagaactacactttgtagaacaatttaagaatgaagctctctttgtcagtaagatgaggtgatccttgtcattgtcttctccgtggcttgatatatagggattccaatgtctcttgagtcaatgaatgaatgaaatgggatattagatgaaaaatgtttagcacaaggacaggcttaaaaatggcagtattattactaatgaaaatattgggatatatgtttgtcacgactaaaatactagcataagatggtttttctttttggccttgaaaaatagtaattgtcctgtactttttcctttaaaagctaatctggattttgaagtatctttttgatatgtgcagcacttcaaattaggacatcatttaagcatctgtcagatttaattgtaatgcatgggtacagtatttggttcagggacatttagtcataattcatcagtttaaaaaaagctaagttacagttatgtgcaaaacaccactctcgatgaatgagctatataaagaaatgtaagacatagtttctgtcttcaaggaatttgcagtgtggttggaaagacaatacatgcacatgtggaaagttatggaagaacacaagtttttgtattttttttttttactgtttcattgacctagttttccttttatttcactcaaacaggtttctcttcattctctttttctctctacttctttatatacttagttttcgtactcctgcctgcttttgaaattcaatttgtagtctcctttgagaatctctcctgatttacagttagcaaaggaacttcttctttggcaatgaaattagttcctatttctttatcattttccatttctaaaaatatttaattgctatgctcatttttcaggtatttaggcatagtatttttttgtgtgagtggtagggaaagtttggagaaagttataaatctttagaagttgacattgtggtatgttaccgtttgaacttataattatagcttgtgaaaggaacagtggcaaggactcagcaattcatctttctttcaagatcaaatcttcgaactcttcatctttgaaagaatgtagacatgtctctatataatacaacaagagagggaatataatttattaaacacaagaaaaattttctgaaaatccttggttgctgatgttctaagaacagttttgataattgtagatttgaaatgtatttttaaacaattggctactgcacatggaaatattatagctgtcacatccacatgtatctcctgttttttttttttaatgatagtatatttttgcagttacttgggttgggttttcttgccttttcttgaagtaaaaggactctgaacagtttctagcttggagaagaagccatttcttaaagagtttggttctggcactgtgtagccacttacaggtcttagagtttacagattttggaaagccccatgtcttatgtattgattttcagatatattattggatgagagtgaatattataaaatttattctctagtttcctggagamaaggaaatctctgtcaatttaaacagcaaagggaaaataaaaaagtctttttgaaagataaacatgatcatttgttagcaggaaaaatactcaataagagatacaaaattatttaattttattcatctaattgttttaagacccctgggtcaaagggtttcagagagaggccataaagtattagcctggtaatttgattgggggatattctgacctcctgacactgctggcatcaggatccttcctctagttttcttagagcattgaaagttgctgattttggtacaggtaattatcttttgttataagtgactttttgaagcctttgttatattactacaatcagtttttctgtcttcaaatatgattgtaccaaatcttttattatttatttattttttgagatggaatcttgctctgtcacccaggctggagtgcagtggcgtggtcttggctcactgtaacctccgtctccctggttcaagtgattcacctgcctcagcctcccgagtatctgggactagaggcacatgccaccatgcctggctaatttttgttttttcagtagagacagggtttcaccatgttggccaggctagtcttgaactcctgacccaaagcaatccacgtgcctcggcctcccagagtgctgggattacagatgtgagccaccatgcccggcctgtaccgaatcttttaaatggaaactttaatagaagattgcttctgaagaaataattcctgtttaataatgcaaagggaaaagaattaacttttaatttccaccttataccttacttgcctaagtacctattgaaaaccatcttcttggccgggcatggtggcttacacctgtaatcccagcacttcgggaggccgatgcaggcggatcacctgatttcgggagttcgagaccagcttgaccaacatggagaaaccccatctctaataaaaacacaacattagccaggcgtggtggtggacgcctgtaatcgcagctacttgggaggctgaggcaggagacttgctggaacctgggagatggagttgtggtaagccgagatcatgccattgcactccagcctgggcaaaaagagtgaaagtctgtctcaaaaaaagcaaaacaaaaagaaaaacaaaaaaagaaaaccatcttcttgaggagtctacttaagttcatagatgttataatttgttcatattactttacaacttaaaaaaacaaacaaaaacatttaatataaagttagctgtggtttataatattctgaattatggagtgaaaaaacagatttmaagtcctaactaaagtcactctagtgagaaaagttttctgagactagttcttgatcttttgcttttgttagtaccactactagtgtaacatttaaagataagtagaacattaaattatttgtgccaaattcaccccttttaaaaattaaaaactttgaaaacaaagtatctagttgtaaaactgtataatagcatccctttctatttgaaaaaaagatatgaaagatatgtatatatgaaggtcagtaagttatacactaaattattcgtgatgggatagttgatttttaaaaaatatttctgtattattgtttgaatttttttgaccaagagaaaaggtgaaattaaagggagtagatggtaaagctttaagtggaattgatgttgaaaagtgtaacatcaaaaagtaagttttcccagccttgagaaaaagctactttattggattacttttatgcttagatagaatgtatctatatagtacataacagtgcattgggccatagcattctagtattcacatgaatttaactgtatcataaggaagagaaatagtataattgagggaaaaaattgatggtatgaaaaagtaaattaattctaattgagttaccttaattctttttgtatgttaattgattaatgtgatcattgcaaaagccaaaaagaattcagtcagaaatatcatgatataatttgcattccattttctctgtgaccgtaaattgttggatattgcaacatatgtaacataaaccacatgtcagctgtttcctgcctcactgttgacaagagccccattcataactcttctttttatccttttagtgaataagtaattattcaatatagaaggcaggatatttggaactggctatttaatgtggcagcactctgtaatgaaatctgctgttactggcaacctgagaggagaatgtaacaattccagcatggctgtaactttatctgctttgactgactgtttatttggcacatcagtgaaccttttatcccagtgagtgacagctccagaagggtcacatttacatccattctatcatgtattgtaatatttaatggcggacaaggttgagtgagactgggagtaatttgaacttgcttttccactgagttgaggctaaaagacagcttcatccccagtattgtggtgtaacatgctatgacttagcatttgtttatgaaggctaatcttactgattacaataataaaaaaaaacagtcaagtagagtgtttgttctactaaattaaaactctttagcacacagtcttttaagttacaatgctatttaccttttttccctccccatcaatgaccacttctataaattaaccattttacactatttctctaaaatgagactttgttctgtgtcatttggtgtaataattgagacttagaaggaagtagttattaagaacctgtgagttctaatatatagcattaaacttttttttttagtatttgagaatttggaaacagaagagaaaaatcaggtaaattaagtagactatattcctgatgttccatatggtttgtttaaagagacatttatataactatttcagttatgaaactgagttacaagtgaaattgtccaggaaaaactaccctggatgataattttactgattggtttacactccatgacaggtaactgaatttcagatatacttgttccacacaagcaacctgctttcattattaaatattaatattttgcatttattttcgtacctttgctaaagaagaattttctctttttgaagttgttaagtgatcctttagattcaacttgataattctattcttttgtaaactatatttaaaagtgcttcaaaagcattggtgtattaaggaatatttgaatgaactatgctgtgaacaaaactattaactctaaactataatatcacaagttcgtatgaagcctaagaaaaaattaaaattgttcctactttgttttatcatttttataatttatgaaagaggagagttaaaatgtactcaaaacatttggaattggagagttagagtggtatgttggaaagaatgcaaatttggaaatatcatttataacttttaaaagaaagaatgaggaccaattttaaattgtagttttttctttaatggcaagttttagatactataatttcttgttatttctctttatttgaccattgtgattcattacttacaggttctgattccatgtgaggtttgataacgttttttatggtagtttagatattagttatcgtttctttcctttcttacagccccctggccactgttctaggtgctgttgttctactaaacaaggaaacagtcaagagtcatcgaataccattaagaaggatcatacagggaaatccaagatacccaaaatatattttgggacacgcacacacaagcagattgctcagattactagagagctccggaggacggcatattcaggggttccaatgrctattctttccagcagggatcatacttgtgtccatcctgaggtagtcggtaacttcaacagaaatgagaagtgcatggaattgctagatgggaaaaacgtgagtaaagttattttgtgttagagaaaaaataaggctgaaaatatttaaattactcagtatgtgttttatatgtacattttagtgataatcaacttcggaaaatcaaattaactgctagtattgatatcttttaaaaaacaattttcctgtaataaaatctttagtcaagttttaaagtatgggatttggtcttaaagcttgggatatttaattccttgaaattaatttctgttgtagtcagacatcttagtttcttcttttaaatcctgctaccaaaaatagtcaaacttggatgatatcatatgaggagatagaagtgtttaaatggtttagtctaattagatctaattaatatactttatatacttaaaaacttcaaaagcagatagtttatttaggctgtctgggcaaagtttgaattttcttaattgaatgagaaatataatgattatcccacctcataattctgataaatacamacccctcttttaaaagttatactaaattattaactttcaaaagatgtcattggtggttttgaaattttccagggaaattagaataatatgaatttgggcttggtggaaatagagaattctttcttactaaagacttatatgactttcaaataatttcttttggcagtattagtttgggagcctatgttctggtgtgataattagtttactctaaaattgaagttgcaagtatgaaattatacccccaaatcagtgaaccataaattgattactatgaagtgaccaatgatattttaatatatttttagagttgttttgtttttcactagtatcttattagagttggttctacacaaaaaactgtgagctatagcccccagagtttcatttcattgatatatcaccccctaccatataatgtgaattattttgttttatgcttttcttccttaatactctcttttatagatgaaaatttatttaaactttatttagggatggtcaaaagatactttaacagatattcaaacgagattataaagtataagtagtaaggtgttccaatggcaaaacttgagtgacttgttccgagccaggagagaatacagaattactgaatcaaagtcattgttgaaatcctacagtcatatttatttccaaagagttatttctaactaactgaggaattgtgaaattcctttactctgtatattaaaaaacttctcttcaaggagagatgaaagtattaagtgtcaggtgttcaaaaataataaaataaagctctttatggtaaaactccatgaatttcatgcataagtagactgctttccatagtgactaagtgatctgctgaattcctcaaatgcttgaaatttattttttggctatatagcctatgcaagaagacttgctggcattgtcaccatatttttatctttttttgttttacttgttattggggaaattaattatgtatttgtaaaaaatacattggctgggcctgatggttcatgcctgtaatcccagcactttgggaggcagaggcgggcacttgaggtcaggagttcgagactggcctggccaacatggcaaaacacatctctactaaaaatacaaaaaattagctgggcgtggtggcgcatgcttgtaatcccagctacttgggaggctgaggcatgagaatcgcttgaacccaggaggcagaggttgcagtgagccaagatcgcgccactgcactgcagcctgggcaacagagcaaggctcttgtctcaaaaacaaccaaccaacmaaaaacatacattggtaaaatacattggtaaaagcaatgataaagtgtaagattgtgtattgaaggcagacagtttcattttgtgtaacctagaatcctacagtgctggttacgtttttattgatctttactcataagtttgaatcatgtaaaaataaaaaggaattcagtagacttcaatgttccgaatttttcattggcctttagtttgtcttaaagtgaacaggtattttattttttaatattagtaatatgaataattgaagatatctgcttgtggtttgtcttgacctaattctgcctcagaatgcttacctcacgggcatacatgaacatcctctttcttgttctcaagccctgttagtaatttggtattgtaatgaagggcaattacaaagtcaccataggtgtctgtgtttactttgactgaattaccaaagcgaaatgataaatagataactgacagtttgaatggaagtgtttaaagtgtgataacacttcaattgacagacttcctcagggttgtgttacactgctaaaatggatgagcttttctggttttgctgtcagcctgcagaggggtgtcattctaactgcccttaaagtgtaaactttctgattttttggcttgatccaaggcacatgtgtttttgttcattgtttcttttactaaagtgcccttatactggaaaagtatgcacttatctgttaaaagttaatttttgtttcagttaagaaaaaataattttaactagagtcaggaatgacaattctgaaatattattttagatatatatctttttttggttaaaatgagacttaatagctcatagtcatagattctaaaggcactttagtgatcattttgtataaaggtaagctttcagaattgtatggaagaagcttggaatgaagaaatggtgaatrtcctattattaaactcagtctgtatcaaactgagagtatgaaagatgattgacacgtttttacctgaatcacagaattttagagctggaaggaattttagagatgatatagtcagtgagtcagaaggaatcttacaagccttctggttcaaatattcttttgatgcttagtcacatgagaaaaatgggccctggagttttctcagtcagacaagtaattagcaaggagggaccagaacccaaattttctgattcctcatccattgctattttggttacactagaaacaaaatccaaagatggcattgaggtagggagaagttgacacagtatgaagaataagaacagtagaggttagagaaagtgagtgaaaataatgtagaaaatggcctaaataaatatagttagatgagtcctttcctcctaatttttatttttaatactttggaggactaacaggtatcatcctttaacatggctgaatacaaagctttaggagaactggtcctcagctattcatgtcttgtcctttgatttgctgacattcttttataggttatgaatctcttatggtttactttgtttctagcaatatctagatacatttgtgtatgtattgatgtatgtatgttttgaaaacacggattctccttttggataattcatagataaaaatacatgtaaagattatatatatgcatatatatgtgtgtgtatatatatacaatttaatttattatacagaygtatacaaatacaatttaattttacacacacacacacacacacacacacacacacacacacmgaaagagagagacatttcatcctgccttggcttctcaaagtgttaggattataagcatgagccagtgcgctcagcctgtaatgaaatcttttatttccagtaatacaatggcaaaggacattagtagataacctaaaagaagaaattcaaattattgctgaaccttgttagactaattatttttatattttataattttaataattattagacaaaaatattttgaatatatatatatggggaaattattatgtatttgtaaaaaatacattggccgggcatgatgctcatgcctgtaatgccagcactctgggaggctgaggtgggcacttgaggtcaggagttcaagactggcctggccaacatggcaaaacctgtctctactaaaaatacaaaaaattagctgggcatggtgatgcgtgcttgtaatcccagctacttgggaggctgaggcatgagaagtgcttgaacccatatgtatatatgtatgtgtatgtacacacacatwcacacacayacacacacacacacacacacacacacmtatgtatatagctgcctcaaagtcttttatccctgatataatttatatattttatgtatggttgttttttgttaaggatagcaaactaggaaaaataaatatttttatttcaaaatcgttttaaaataaatagtagaattaattaaaataaaagtggcccattattctaccacttagttccaatgacaattgaaaaagagaagtagtacatgtatgtggttagaaaatgaaaagagaggctttttctagatcctccatctccttaatcctttaaggtaactactgtaagattttatatatctattctaccagaatgtttaaaaaatgtatttgctataatgtatgtgcayatattctttaaaaaagcaatttacatgaatttaatcattctatacacgttattcaacatgtttttctcacttaacatagagagcctaatcaacacatagacraatctaaatcatttttaagggctaaagtttttgtattaatttaccataatttatttaacatgtcccttatgggtagacatttggttaattttcaattttttggctatttaacagtacagggtacatctattcacattaatggtaaaattttaaattttggtagttttttgacaaattgcctatgtacttctactactagaattttatacttctactaaaaatatatatacttttctaattttgtacatttttaatagtatatgagacacttgttagggctgggttttatcaaacattttatttttttattaatgcacataatgagtatttttttttgagacaggatctcactctgttgaccaggctggagtgcagtggcgtggtcactgctcactgcggtttaattttttttgtttttttgtagagattgagtctccctgtgctgcccagctggtcttgaactcctaggctcatgcagtcctccggccttggcctctcaaaatgttgggattataggcatgagccactgtgcccagcctgtaatgaaatttttttatttccagtgatagaatggggtggagtgcagtggctcatgcctgtaatccccagcactttgggaggccgaggcaggcggatcgcttgagttcaggagttcaagaccagcctgagcaacatgacaaaaccctgtctctacaaaaaaggagccatatgtggtgatgcacttgtggttccagctacytggtggctgaggcacaagaattgcttgaacctgggaggcggaggttgcagtgaaccaagattggatcgtgccactgcaccccaggtgacagagtgagactcccatctctgaaaaaaaaaaaaggtaatagaatggcaaagggcattagtagataacataaaagaagaaacacaaattactattgaaccttgttagactattcatacaacactatgttaaactttgctagaaactataaaaaatacaaatcaaaacaagattctattttttacttttaagatagagataacaaaagataacaccagtgttgataaggatgtgggaaaagggtaatgcaaagcaatatatactttctggaggataatttcactatatgttttcaagaaacttaaaaataccttgtagcgtctgatcccataatgccatttctaaaaatatagactaagaaaatatttagaaaccagcataagaatgctcactgcagccttatgtctaaagcagaaattggtaacagtctataagcccagtaataagaaaactggttcatcagctatggcacattaattcaatgtacatatatgagcagcaacgaaaagatgcttagtgatgtcaagattttccttgtatgatttttaatacgctagacagaagaaaacaaagggaatatgctttataaaaatttttgtttattgtggctgaattgttaataatcctcaatgcctggggaacatttgctttgttcttgtttttattactatttagagatagggctttgttttgtcatccaggccggagtgcagtggcttgatcatggctcactgcatcctcgaactcctgggctgaagtgatcctcctgcctcagcttcctgagtagctaggaccattgatgtacgccaccaatcctagaaaattttttattttttgtagagacagggttttgctacattgcccaggctggtatcaaactcctcacctaaaacagtccttttgcctaagcctcccaaagtgctcacacctgtcatcgtgccttgcttgttcttgttattttaatattgggtcacattgtagagatatccttatatacacatgtatagaagaaatatgaaatgaaatacaccaaaatgtttctagtgcattctttgtgtaatagaattatggataatttaggctttttttggtactcctgaatattttgtagtgaatactcttactttctttttttccycttaggacattccaacctacctacttaccttccttccttcttatttatatttgaataagaaatactatcacatggctcaaagttgaaaaggtacaaaagggtctacagagaaaaatctctcactcctgtgcccagtcacttaattctcatccttggaagcaaccagtgataccattgttttgtgaatcctttcagaagtatttcatgcctaacatcagtttaatcagaaaaaaaaaggcataacaaacatatttaaaagaaatttttttcaagttaatttagggtatttggagctcttccgatttggacttctatctaagtctgagtcaaccagacttcgttgtgattgtagctatggtattgtctcaaaaaagacaaaaaattagccaggtgtggtggcgtagccagtaaaatcttagccttgtggctttaatgatgttcctcaaattctgagataagcttattttattccttctatgctaatattggttcacatttcagttatgcatatttgtttctagggaaaatcctgctatttttatcatggagttcataaaattagtgatcagcacacattacagactttccaagggatgtgcaaagcctgggatatagaagaacttgtcagcctggggaagaaactaaaggcctgtccatattacacagcccgagaactaatacaagatgctgacatcatattttgtccctacaactatcttctagatgcacaaataagggaaagtgtgagtatatgtgtaaaaatgagaaccttcttcctactcatggagatgtaaatgttgaatgtaaaagcttttagatgttttaattttttttgctttaatttatgtaaataaatttgtgtaaacatattagagtactgaaaacatatcctaacatgggttaaaatcaacccactcattttaatttccaaaataacaagcagttttaaggaacatagtgactgaagtgggattacagcaggatttctctttgcatttatgaatattcaaaaagaattatttagaaacatttctctgaaaaaactatgttttgaagaacttatgtgggggaataaaattatgccttgtgagctttgagaagtgaacttcagataatggcatttgtgtttgtttgcctggttctttttagagacatgcaattgttaacagcataagacaaaaagtgaataatttggcatagtcaattgttattcctgtcttcagatctgactgcacaattcatctcagctttctatttctttaagatccaaattaataggcattatgtttactaccccttctatcctacctcttatttggttatctcttaactagatctcttccttctgagacactgtgcatatcaatgccagrtcagttttccaaatattgcttttattacatccttttatctgcctaaaaatctattgcttcctttgctcatgagataaagttcatatttcttaagcttacactcaagatgctcaatagtctgacctggatctgcccaatttgaatccttcaaaaattacctcatactcccttgaggataccttgttctttactctatctttgcttttgatgacacctctttggaatgccctgtccactctttgtctgtccaaatccaaatcctacttatcttttaaaccccaatatatttcctactcttccatggttttttctcaacttttcagctgtctgtgtattcttacttcctcaaaataactcattgacaattgctttgtgacagttccttgtattagtcagtactctttctattgcaagtgacacaaacctaccctaaaaaatgcttaagaaaaaatacttgattctctttattgtgatggctttattctcaggcaagttctcactcttgcttatggaacaaagataaccataagcagctagctcacctggagaaaagagcatggccacatattagtccctccaaattactctggttggcctaccgtggatcacatgtctgttcctgaacctgaaccagtcactgtgaccacagaaggatggaatactctatttaactgacaatcctgggccttacccccattgtgaaagtggtgatgtcctttgattcacaggttaatagtcctgccagcatcacatgggagttggagaagaacaattctccaactcccatgttggagaaggattgcaggacagattaaaacaaaacatatatattatgttagtattttaagagtcattttaatcttgtattgttattttacttttaaaggttttatgcttttaatcttgtattgttattttacttttaaaggtcttatgcttttaatcttatattgttattttatttttaaaggtcttataattagtttgtaaaattatgttggaaacactttcatagtgggattttatacctttctgtgtagcctgtggtaccttgatccagactcactgacatatttttgttgctgtcgataggtttgcaaagtattttaagagtaaaaaaatggcaaacacaataatgtagagctgatatttggttggccatagtgcttcagaagttttatttaagacctagaatctgttgcttatgtaattgcatttgcaatattgkcctatagtgtgaattttaaaatgaaatatcttgcctgctgttgttaaatctattttgccaaatgttttacaagaaaattcttttatcttatagatggatttaaatctgaaagaacaggttgtcattttagatgaagctcataacatcgaggactgtgctcgggaatcagcaagttacagtgtaacagaagttcagcttcggtttgctcgggatgaactagatagtatggtcaacaataatataaggaagaaagatcatgaacccctacgagctgtgtgctgtagcctcattaagtaagaagatttgtctattagtgtatttgtgctgcctttatatgaaaaatatgtttgattatgccagagtatttaaagttagtaaactttggttaactaggcttcttgrgaaatgaattgttccttgccagttaagctttaaaaacaaggctagtccaaccttttgtcttgttcacaagaatataatgaacataagtgatttttaaaaatgaataattgtgaatcttattcctaatttggcaggataacataatagccccgaaggatgtgtctaggatattgaaccagaaactaaacgtgcttttaattaatatattttaaaattctggatcatggctttaatttattgctttattctccaatttaaataggattctagtttcatgggttttaattaatcaagatttcagtactctaaaataatatatttagtactagctttatgacaatttacactaatttttcttttattagacattaagttgttgatctagaatcttgttaccatagaaaaaaacttcccaactctgaatccyatttcatttattgtagcatttttctgtttccttcacatttacactttaaaaaaatttgaatgttacacagtcacatggtttgaagacaaaatgtatacaaatttgtatagtaaaaacctccttccagttccatccctgatctgtttaatgtctgtgttctcctaaacaagtttatcattcaatgcatattactcatttatgaaccaatattagatatattttcttgtccctcactattttccaaatgatggcatagtatacatacatttttctgcaacttgcttttttcaattcccagtgtattttggagaccttcccatgttaagacctagaaagctttctcagtttaaaaaaaaaatagatatctagaattccattagatagatatgcaatagtttatttaaccagcctctgattaatagaggaggttgtttctagttttttgctcttaaactgctataatgaataactttgaacatacataatttcatttgtatgcaaatatatctataggaatctttttagaagtggaattgttgggtgaaagcatagacatatttgtaatttcaatagatatagctaacatttacacaatgggtggatgacaggggggctaatgtatgcttctaccagcaatgtataagagtatggaaattgttttcttctagcctgctaggtgaaaagtggtatcccaatgtagttttaatattcattttccttaatatgcatgaaattaagcatctttaaaggccatttatatttccttttgtgtcaactgcctgttgacatctctgtcctttttttgttcttattgtggttctttttcttaatgatttatagaaccccattcatatattagggaattaaaatctttgcctgcaataagagttgtaaatactttccaccccattttgccatttgtgtcttttctggtggtgttttgccatgcagatttttgtggtttttattttacagcataacttgttgaaagagttgtctgtagttgctaattctattttctcacttgacattcttccctcatcgatcttagcagtgttgctctctggacaattctacgcaaattgttttgatcaagatcactagtgatctctatattgccaaatacagaggttattgtttcttttatctcagccagtcagtggtgttgggtagttgatgactacctctttgaaaagcatttttgtcttagcttctgtgacatctctgattttcctccttctcacagtccatttttttttatcatttcttttgataattcttattctttttgatatctaaatgttggggtgcctcaggacttacttggtactgggacctagtttcttctgtagttctattttccctaaatagtttgtagtatcatagcttagaatataatcttcagtactggtgaggcctgaacctatgtctctagcttcagcctctccctagaatgccattcttatatccaactatctactttatagctctttttgtatatcaaaatagacatttcaactttacatctaaaacagaattgcttttcttcctgtgttctgttttctccccagtcttcctcatctaagcaaacagtatgtaccagttcctcaagtaaaaaagttaaatactatccttaataatatccttactgcctcacctcatccaattaatgagtaagtcttatagatgccacctgcacagtatatccccaattcctcaatatcattgattgttcatatctatcatcctacagtcttctctcaacaaggatattataacaacctcctaacaggtctctactttcactcatctttctccagtaatcaattctagcttggtagctagaatcattttttaaacatgtaaaatagatagtctgtcttttatttaaaactctgtatttaaaaccttcccaccaaaacagcacagtactggcataaaaacagacacacagatcaatggaacagaatagagaactcagaaacaaatccacacacctacagtgaactcatttttgacacaggtgccacgaacatgcactgaggaaaagacagtctcttcaataaatggtgccgggaaaactggatatccatctacaggagaataaaacaagacccctatctttcaccattaacaaaaatcaaatcaaaatagattaaagacttaaatctacaacctcaaactatgaaactactaccagaaaacattggaaaaactctccaggacatcggtctggggaacaacttcttgagcaataccccacaagcacaggtaaccaaagcaaaaatggacagatgggwtcacatcaagttaaaaagctgctgcacagcaaaggaaacaatcaacaaagtgaagaggcaacccacagaatgggagaaaatatttgcaaactacccatctgacaagggattaataaccagaatatataaggagctcaaacaactctgtaggaaaaaatctaataatctaattaaaaatggacaaaagatttgaatagacatttctctaaagaagacatacaaatggcaatcagacatatgaaaagtgctcaacatcattgatcagcatttctctgctgatcaaaactacaatgagatatcacctcaccccagttaaaatgacttttatgcaaaagacaggcaataacaaatgctggcaaggatgtggagaaaagacaaccctcgtayactgttggtgggaatgtaaattaggacaaccactatgaagaacaatttggaagttcctcaaaaaacttaaaatagagctaccaaacgatccagcaatcccactgctagatatatacccaaaataaaggaaatcagtatatcaaaggtatagctatactcccatgtttgctgcagcactattcacaatagtcaagatttgaaagcagcctaaatgtccatcaacagatgaatggataaagaaaatgtggttacatatacacaatggagtaccattcagccataacacagaaggagatcctgtcatttgcaacaaaatggataaaattggaagtcactatgttaagtgaaataagccaggcacaaaaagacaaatatcacatattctcacttatttgtgggatctaaaaatgaaaacaatttaatccattgagatagagagtagaaggatggtttaccagaggctggcaagggtagtagatggggatcacaggggaggaggggttggttaatgagtacaaaaaaaagaaaaatagaatgaatgaataaggcctagtatttgatagcacaacagtgtgactatagtcaataatgatttaactgtacatttaaaaataactaaaagaatataattggattatttgtaacacaaaggattaatgcttgagaggatggataccccatcttccatgatgtgattattacatattgcatgcctgtatcaaaacatgtaccccataaatatatacacctactatgtacccacgaaaattaaaaattaaaacccaagccttcccattgccctttgaataaattcagatttcttatgatgactcaagatgactgatttctgcttatcactctgacattgttcataccattattcatttttgcccattgtgctgcaaatcatattggctttctttcagatcctcaaacaagcaaaatttgctaaccacctcaggacctttctcctagctgttccttctgcttggatatttcttttcttctgattctcccatgactggatactttttgcattcagttattagaataaatgtcacctcagggagagcattcttgacattaaaattaaagttgcaactaggttatattaaactaatttattttcataatttatttgtatataattacctgatttttttttcattttattagaacttttttttttaacttttaagttcaggggtacatgtgcaggtttgttatacaggtaaacatgttatgggggtttgttgtacatattatttcatcacccaggtattaagccttataactcattagttatttttcctgatcttttcccgtctccaacgctacaccatccgataggccccagtatgtgctgttcccctcttgtccatgtggtctcatcatttagctctcacttataagtgagaacatgcagtattttctgttcctgcattagtttgctaaggatatgatctccagctccatctatgttcccgtaaaggacatgttcttgttcttttttatggccatatagtatcccatgactacctgacattttcttgtttatgtatttgttttgatgtttattcctgtctccctttagtagaatgtaatttccatgagagtaaggaccttgcctattttatttaactgctgttattttcactacccagaacaatgtctggaataaaataggcattcaaacacttaatgtatgaatgtgtatatatatcaatgaatgtatttatatattttctagtaattctcttttttgtgttaatatgtaacactttaatttctttattaggttgttttgcatttccttttatatatatttgggataagtacctaagacctggctctcagttgaagagacattagctaagtaaagcaatgtgaatccacaaaacaagtgggaaatcatatgcatgtttgtttcttctgaataaaagctttcttttcagttatataaagtttattttgcaatatgagacatgaatgctttttaaaaggtgtcttaattaatccacattcatgtcctaagaatgtcaagatatacagatcaacgcatgacaataatgatgattctcttgttctgctgaaatagtgtgtgtaaggatgatactggttgacacaattgttttattttatttcagttggttagaagcaaacgctgaatatcttgtagaaagagattatgaatcagcttgtaaaatatggagtggaaatgaaatgctcttaactttacacaaaatgggtatcaccactgctacttttcccattttgcaggtaagatattttttctacctgtgaaacgtatttagtgaattagaagtgatttagtcgtgactaaatccagattaaatctagtgagtaacccagaattgttaaatatagcaatttaattttttaaaaattttattatctaaatttgataatctttaagtgatggcatgggtaaattgtgggtgaaaatatagcattatttagtttgaaggaaattagtctttaaagggattaattgctttgtttaaagctaaaaggagtcaatatttttaggttgtagacttacttagtcaattgtaaaagttaaaattttagaaaataaaaagaggagaaattcctatttygttcatcttaatttagaaattataaacctgatattcatggagagatcatgagtaggctttggaagactatgaaacttatgaagctatatgcaaaattttatgagcgtatccttttgtacatttttctaaatagaggctgcataaatttcattatattttctaatgttttttgccgataagaatatattttctttttttgttgctatttacttatttaaattaatagattatgtattttagaatggttgttttaggtttagagaaaaattaagcagaaggtccagaattctcatatactctcactcccagctacacacctatacacatacacaatacacaccaactccatagtttccccattattgacctcttacaatagtgtagtatatttgttataattgatgaaccattattgctacattattgttcattaaagtccataggttaccttaaggtttaccccttgtgttgtagagttcaattaggttttgcctaggaatccaccactacagtatcatacagagtgtgttcactgtcctaaaaatcttctgtgttacacctattcatccctccaccacaccacgcccacacccaccaaacccttggcaaccacagattttttttactaactccattgttttgccttttctggaatgccatatagttgaaattgtgcagtatgtagtcttttcagactggcttctgtcttagcaatatgcatataagattcctccatgtatttttttgccttgatagctcatttcttcttatagctgaatgatatttcattatttggatgtaccacagtttatccattcacctactgaaagaaacattgatggtttccagtttttggcaattgtgaataaagctattataaacatttctattagtgacaagctttctactcatttggatatttacttaggaacacaattgttgtattatatggtaagactgtgtttagctttgcaagaaactgctaaacagtcttcaaaagtggctgtaactgccgggtatggtggtatgcgcctgtagtcccagctacttgggaggctgaggcaggaagattgcttgaacccaggaatttgaggctgtagtgcactatgattgcatgcttgtgaatagccactgctctccagcctgagcaacatagcaagactttgtctcttgacaaaaagtggctgtaccattttgcattcccaccagcaatgaacaraagttcctgttgttgtacatcttcaccagtgaactttggggctgaggactctgcttctacgagtacaacttttttagatgacacatatgagtgatagcatgcagtatttgtctttctatcaggcttatttcagatagcataatacttccagtttcatccatgttgttgcaaatggcaaaattttcttcttttttaagactgaatatttcattatatatatatgtgccacattttctttatttcattaatcactcactatattctcacttttccccatgggaagaattgtgggctaatggaggctctcttggcactgrgctgtacttccrtggggcaggggtgatgtaggtaatatgaaactatactttttgccctcttcaatgcatctgttcttggattttttgctccaatggggtcctggaacttctctgctagactcttagactcttaacaaaggtactctcatgtgcgagtggttgtcagaattggttcattgttgggagatgacaatggaaaactcaaattcttttttttttttttttttttttgagatgaagtctcactctgttgcccaggctggagggcagtggcgtgatctcggctcactgcaacctctgcctctcgtgttcaagtgatcctcatgtctaagcctcctgagttgctgggactacaggcatgccccaccatgcccggctaatatttgtatttttggtagagacagggtttcaccatgttggccaggctggtgtcaaactcctgacctcaagtgatccacctgccttggcctcccaaagtgctgggctcacaggtgtgagtcaccgtgcctggctagaaaactcaaattcttccatcttgctgatgttatttctcaaagaggtttttgaacaaaaaaaatgatgaaaataattgccaacatgatcacaatagtattcggggcatgtgactattaaaacatatattttaatcaggatatacttaaatttttgccctgcatttataaaatgcagcgtggtatctattgtaagaatttttccatattgtgacatctttcataatattttttgcataaattgtttgcattttgaaagctacttatataacagtaaaatggggctgagggtggtggtgcatgccagtaatcctacactttgacaggctgaggctggcggattgcttgagcccaggagttcaagaccagcctgggcaacaaagaccctgttgtctacaaaaaattagctggtgtggtggcatgcgctgtagtcccagctacttgggaggctgaggcaggaggatcacctgaacccaggaggttgaggctacagtgaaccatgattgcaccactacactccagcctggggcacagagcaagaccctgtttaaaaaaaaagaaaaggataaattgtagcatattcatatagtggaatactacatagcaataaaaaatgaactgcttccaacacaaccatatagatatatatatatatttttttgagatggagtttcgcccttgttgcccagactggagtgcaatggcgtgatctcagctcaccgcaacctctgcctcctgggttcaagtgattctcctgcctcagactcccaagtagctgggattacaggcatgcrccaccacacctggctaattttttgtatttttagtagagacggagtttctccatgttggtcaggctggcctcgaactcctgacctcaggtgatcggcccaccatggcctcccaaagtgctaggattacaggtgtgagccaccgcacctggctctagatgaatcttaaatattatgttaggtgaaggaaaccagattcaaaagggtataaactgtataaatctatttttatgaagttgaagaacagacaaacctaattatggtgacagaagttgaagtactggttacaactatgtgggggtttgaagcagtttgggctgagaaggggcacaaaggaacatctgggattctaggaatgttttgtatcctggtcaggtgttagttacatggggaggtgtgtgtatttagtgaggtgtacatgtaagattagttcattctactgtatatgttacatgtcagttataaaatgtacaaataaaatgtatgtcaagggaaaaaaactggaaaatacagaatggcacaaagaaaaatgactcataaactcaaagatgaacattgtgaacattgtgatttatgtctacttatgccttcttctatgcccatatttgcttattataaatatatttctgatatgacacatttgttttaccctcttttaatttaacaatatattgtgtatactttcctatttaagtaaagattccttcacataatttttaattgcggtgtagcatttttatgagtgtacttattctaaattgattaatctgataagttgaaatataggttatttccagtttcccagtataataaacagttctgatatgaacatcccttatgaattgtggtttttgaatttactttaagcagtcttttcttatcctatgttatatttctcctaaaaattttaaggtatttattgtttataaaggatgggatttataaatacttttacaaagccttggattcattttgtttatgttgtgaatttatgaatcaatttttttcctgtatggatagagaattgtcccagcactgtttcctaaatagtgcatattaatttccctctaatttgtaatgctacctctgctacctatttttctttttttaattaaaaaaatattttttaactttttttttttgtttttaagagacagagtcttgctgtgttgcccggaatgaagtgcaatggtgcattcatagctcactgtaaccttggatttctggtcttaagggatcctcctgccatagcctgctcagtagctgggactacaggcatgcattaccacacctggctaattacttatttttttatttattttgagacagaatctcactctgttaaccaggctggagtgcagtggtgtgatctcagcccactgcaacctccgcctcccaggttcaggcaattcttgtgcctcagcgcccccaagtacctgggaccacaagcatgccaccacacctggctcattttttgtatttttttgtagagacgggcttttgtcatgttgcccaggctggtctccagctcctgagctcaagtgatccacccgcctcggtctttcaaagtgctaggattacaagcatgagccacccgtgcctggcttaattttttttatgttttgtagagacagggtctcactatgttgcctaggctggtcttgaactcctggcctcaggcgatcctcccacctcggcctcctgaagcactgggattacaagagtgaaccactacacccagcccctctaattttcatatatgtgtgaatttatatctggacttgattgtgttccaccattctgtttctctaatttgtcacatttgttaattaatgatttaagaaaagtgcttatatatagtagggcatatccctcactttattattttcctttggaattgtatcagctgtcctttgttttactctgccatttgaattttagaattagcttataatctctaggaaaagttctgttagaatttttattgtaattgcactgtatttatagattaatttggaaagaattcatgcatttacattatgaagttttcccattcatgacaagatatagttcttcattattttttcctatctttcaataaaattttataattttatttttaaaagattagatggctttggttagatttattcatgggtagcttaaagtttctgtttccattacaaatgatatatttttaaaattacatttttaattgttattgctatataaaactggtgtttgatttttatatatttatcttataattgtcttattaaccaccttgttgaattattttacaggtttgcccacagattatcttaaattttccatgtagataaccatattgtctgaataatgaccggtttctttctttctcatttctttctatttcttcatgtttttatttcttactatgctgtctcagacttccagtgcgttgtttatcacaggcaatgaaaaagacatcctgggccaggcgcagtggctcacgcctgtaatcccagcactttgggaggccgaggcgggcagatcacgaggtcaggagattgagaccatcctggctaacacggtgaaaccccgtctctactaaaaatacaaaaaattagccgggcgtggtggcgggcgcctgtagtccccgctactcaggaggctgaggcaggagaatggcgcaaacctgggaggcggagcttgcagtgagccgaaatcgcgccactgcagtccagcctgggcgacagagcgagactctgtctcaaaaaagaaataaaataaaataaaaaaaagaaaaagacatcttggttttgttgcttaaaggaggaattactagtattgcaccctttattgagatgtttgctgtgattaaaaattcttttttaattaacagctctattgagctataattcacatgcttaaaatttacctttttaaagtgagttctgtgggttatttttatattatatatttatatataatatatagtatatatattatatattttatataaatattttatataaatatatatactatatatagtatataactatatataatatattaatatataatgttttatatatttttatatattttatatagtatataatatatttttatatattttatatagtatataatatatttttatatattttatatagtatataatatatttttatatattttatatagtatataatatatttttatatattttatatagtatataatatatttttatatattttatatagtatataatatatttttatatattttatatagtatataatatattatatattaatatatttattaatacataaacatgcaatatatttatatataattatatttataaatttatataaatttatataaatttatttataaataaaattataattttataaaattatttataaatttatataaatttataaatataaatataatataaatatattatatataaatatattatatataaatatatatttttatatttacattatatataaaatatatttatatattaatatattaatacatatatgaatatatattttatataaatatattatataaaatatatttatataaaatatataaatatataatatatactatattatatataaatatataatatataaaatatataatatagaaataacccacagaactcactttaaaaaggtaaattgtaagcatgtgaattatagctcaataaagctgttaattttaattcaattcaattcagttaattaaattmaaaaattaattagagctgttaaataatatatatattatatttttattatattatatattttatagttatttttattggattaaggaaatttgccctaattctagttggctaagacattcatcattatgattatcaatatttttaggaatttttaccaaagtagtatacctatagaatataaagagtcagttctgttgagaaaagcattcctctgacccactcctcaatcccaattctcactttggagtgcacttttatctcttgtagtggtttcttctgatatttaaccacatttaaaaaaataacgtgggttctgcttctttggagttttcaattttagatgttgtctgttgactttctgttaagtataatgatgatttagctcctttagacacgcacacactcacacacactcttctctctctgtcacacacacacacacacgctcactcatgcgctctctcttcttcctttgcttcctgcttttctgcccttctttcttctctctcttcactctctattctgccagtatagttatattgatattcagcgtggatatcatcacgtgtatgtattattatagcccatgatagtaatgcatgtagcttacttgattatatttttatacagctttatgtatgtttcctaaggaaccataattaactttttatttatttttccattgcttagttttctatttttctaccccccccaacccagctgccaatgtgtaggtaasctaactggaattgagctcggagtactctaataattgaatatgtaggatttcatttagcccttctgtttttagtacagcgcctcacctttagtagtttatattttctatattttatcagagtaaattgccagtgttctgccagtgttggagaaggatattaagctttgatataaggtgttgctgaggggacttcatttttcaaaaagaataatttgatatttgtatttcattgcagggctgaatatttttccaagttcatgttgtctttcttgtttgttctttgttggtttgttttttaagtctttctacttatttgtattctgtaatgttttgttcagtgaaggctgatttttactcttatagatttgtattgtttcatgatatatctgaatattaaaatgtatctttcttatttatcctatttccccattttattttcattgaacacattttattgtcagacatcagagttgtcaccaatatcttttattgcttcagtattcagaattttctcttttacaatgtggggaacatactcttctgttttcttataattttgttttaatgtccacactttcatccatattaaaacttatgagccatgtaaagaccaaagaaccagttaacatacattttgttatttagcatgtattgtttccttaagtcatttagttttgcttgtgatgtagtcatattattctcagcatcagaattactttctggaaataactcatggatttaaggcaacatatcaactctttaaagccttttggagaagccatttgctacatttttatttaattccttacatctgaaaggcaccaaataataccctgattgaatcttctaaatacctaacttattattaaagagtctttgactctgaggagaattttgctaatatggcaatctaaaatatattgttagcattgtgctgttaataattgtctttgtttgtatcactataaatacctgaggctgggtaacttacaaagaaaggaggtttatttggttcacagttctgcagcttgtacgaagcatggctccagcatctaattttgaggaccttagcctgcttccactgatggcaaaaggtgaaggggagctggtttgtacagatcatatggcaagagaagaagcgagagagagaagggagggaggtgtyaggctctttctaacaaccagctctcgtgggaactaacagagcactaactcaccccctctctacttagggagggcgttaatctattcatgaggtatctacccccatggtcccaaacctcctgatatgccccacttccattactggggatgaaatttcaatatcagatttggagaagtcagactatcaaactatagcaattctgttcacctaaaatttcaatgcatgttttgttgggtttcattgtatttttgagaagtttctttttccaattccctcccaacccctctatacttaatatggtaatttcttatagggacatttttctgctgttcttcaaaaagaggaaaaaatctcaccaatttatggtaaagaggaggcaagagaagtacctgttattagtgcatcaactcaaataatgcttaaaggactttttatggtacttgactatctttttaggcaaaatagcaggtaagtgaagataactagtatgtattttccttttaaaaatagcctaatttggatgctagcatgtgtttaatacatacctattttgggtgagtaaataggagaattgaaaacaagtgttatagatattattatatatttgctcttattgacacagacttagaggaattgaaattagtctgatgcttttttgagacagggacttctctgtcacccaggctgaagtgcagttgcatgatcacagctcactgcaactttgacctcctgggcttaagcaatcctcccacctgtttcctgagtagctgggattacaggtgtgcaacacccacacccagctaattttttaatttttattttttttgtagagatgagatctcactatgttgatcaggatggtcttgaactcctggcctcaagtgatcctcccacctcagcctcccaaagtgctaggattgtaagtgtgagcccatgcctggccaaaattagtcttttatattaatgaatattgaaatcattaaataaatatatttaattaattcatattaaattatcttctattgctaaagttttcttatgttcctacagtgtcagaaagtcccttttttattgtatgaactgtggaaaatgaaaaacaaccaatccctctcatcctgtaacttaaattatagtagtacctagttctggtattttttttttattgtggtaaaatatacataaaatacaccattttaaccattttacgtatacaactcagtgccattaagtacagtatatttgcaatgttgtacattgtactcatttccagagatttccagaaattttttattattccaaataggaattctgtacccatgaaataataacccctagagtctttcccctcatcacctgctaacctgtattctattttcatcttatgaagtcctttctaggtatttcacataagagcgatcatacaatgtttgtctttttgtgtctggcttatttcaattcatttggcacagtgttttcagagttcatttatgtagtagcatatatcagaatttcattcctttctatggctgaataatactccattgtatgtatataccacaatttgttaatttattcttatgttaatggacatttgggttgttttcatcttttgcctattgtaaacaatgctactatgaacgttggtgtacaaatatctgagttctgctttcagttcttctgggtgtatataagtacctagcagtggaattgcagaatcatatggtaatgctgcatttaactttttgaggactcaccatactgtttctcacagcaactgcattattttccattctcattatcaatgcacaagggttccaatttctacacatccttgccaacagtttatgtagcagcatatatcagaattgtttttgctgacactcgttattttattttttgtataatagccatcctaataggtatcaagtgatatcatctggtttttatttgtatttcctaatgactagagaagttgagaatcttttcatgtgcttattggccaattgtatgtcttttttggagaaatatctattgaagtcttttgcccacttttgaattattgggtttttttgttgttgttgttgagctgtagttatttagatattctggatgtcagtcctgtaagagatatatactttacaaatattttctctcattctgtgggttgttttttcatttattcatagtgtcctttgatgcagaaaaggtttttaatcttgttgaagtccaatttatctttctcttttcttgttgttgcctgtacttctagtgtcacatccagtaaatcatggccaaatctgatatgaagatttcccctatgttttcttttcctttttttttttttttttttctgagacgggagtctcgctctgtcacccaggttggagtgcagtggcgcgatctcggctcactgcaagctcagcctcccgggttcatgccattctcctgcctcagcctcccgagtagctgggactacaggcgcccgccactaagcccggctaattttttgtattttctagtagagacggggtttcaccgtgttagccagaatggtctcgatctcctgacctcgtgatccgcccacctcggcctcccaaagtgctgggattacaggcgtgagccatcgcacccggtctcccctttgttttaagagttttacagtttttggctcccagtatttttataagattctctccacagttgttaagttcccaactttaattttgagatctaatctctctaggagtgaaatgaataaggaaatactatagcgaagacatggtagagaatatcacattttacttttttttttttttttgagatggagtcttgctccgtcacccaggctacagtgcagtggcgctatctcagctcactgcaacctccacctcccgggttcaagtgattctcctgcctcagcctcctgagtagctggggttacaggcgactgccaccacacctggctaatttttgtatttttagtagagacggggtttcaccatgttggccaggctggtctcgaactcctgacctcgtgatccacctgcctcggcctcccaaagtgctgggattacaggtgtgaaccaccgcgcctggccacattttattatttttaagcttaaccattttctagattcttattgaaagcagttatacactggatgggatcacagatatcatctggttcagcaccttcattaaaagtagatgaaggctgagactcaggtttcaaaggaatgtaagaattttataacttgttgctaatactttaaaaactttcagtaaaaattatccttctattttctcatttaataaaaaagtataacccaccttttagtctctttaaccataatactgttttctattttgtaactcatcatgtagtagagcatgcagagagctctggactgggagttaggaggcctggattttaattctgcttctgccatgacatatgtaatgtttgaaaatgaggttaggaagtagctgataaaagatagatggttagatgatttctaatattccctctgagaatcagttgattctatgattaatggctttattaatatcagaattactgaatttaattaatggtaaggagaatgttatttttgaatgggaaggtaccagctctttcaaatgagttttaatgtaatcagtttttatattgtatgtagctgggtcataggttttaaaagttttgccacttaattagcactttctttgcatctagatttgcagatgattataaaattgcgattcaacagacttactcctggacaaatcagattgatatttcagacaaaaatgggttgttggttctaccaaaaaataagaaacgttcacgacagaaaactgcagttcatgtgctaaacttttggtgcttaaatccagctgtggtaagctcatcatgtaaatggaaattttgtcttcttgctcagtaccagcattttaataaatgtggttgactcttttaaagatagttgtttgttgttgttgttgttgttgttttgaggcagggtcttgctcttcacccaggctggagtgcagtggtgcaatctcagctcactgtagccttgaccttccaggctcaagcgatcctcccaccttagcttcccgagtagctgggactataggcatgtgtcaccatgcccggctaatttttgtattttttgtagagacggggtttcaccatattgcccaggctggtctcagactcctagactcaagcgatcttcctgcttcagcctcccaaagtgctgggattacaggtgtgagccactttgcccascctcttctaaagataattttatttatctaatgttgttttcttttaggccttttcagatattaatggcaaagttcagaccattgttttgacatctggtacattatcaccaatgaaatccttttcgtcagaacttggtgttacatttactatccagctggaggctaatcatatcattaaaaattcacaggttagttgttgtttttttttttggaaggccttcagtgtttctacttcaatataactatgtaaacaagttagaagatacctgaagtgccagcaagtaaatcttggtaggaaattcaacattccagttttacaataaaagaaaatctgtcagctacttaatgatgtgtcaacagaaggaaataatccagtcacttgggatgcaaaaggctgtatttcagcttcttcttctaagtaagttttagttttgtaatgaaaacaaaattttgatttctttaattctcattgtataattatgttttatttattgattgattgatttttgagacagagtctggctctgttgcccaggctggagtgcagtggtgtgatcttggctcactcgtgtttaagcaattctcctgcttcagcctctcaagttgctgagattacaggtgtgcgccgcacgcctggctaattttttatttttttggtagagatggggtttcagcatgttgtccattctggtcttgaactcctgccctcaaatgatgcacttgcctcagcctcccaaagtgttgggattacaggcgtgagccactgtgcccagcctatttatattttatttattttatctctgtatttttatttttacttttattttttgagacaaggttttgctctgtcacccagactggagtgcagtggtgcgatcttggctcactgcagccttcgcctcctgggttccagcggttctcctgcctcaaccttctgagtagctgggattatgggtgtatgccaccaygcctggcacatttttgtatttttagtagagatggggttttgccattttggccagactttatctttttagagacaaggtcgcttgctatgttgcccaggctggcttcaaactcccaggctcaggcagtccacctgcctcagcctcctgagtagctgggactacaggcatgtactaccatgcccagcttgtataattayttatgcttctcttttccattagactacagtgtatcctgattcttccttttacatccacgttcttcctctgtgcctagattaatagctggtatttagcaagtgttcagcatgtttgaatatctgaaatgagttaaaagtactcttatgagtcctatgatttaagattttaatgttttataacgatggctactaaatgttattttaatttttgtggaaatgtatagattgttatttttcattatgccttctggtttctttttatgaaatattttaaagtggttaggcacacaggtgatgttaagctgtggttaatgctaaagtggttaagttaacatcacctgtgtgcctaacacaatgctagctctttattaagctatatacacaggtttataggtgggaacatttttggtcctcacaattacttgggagcaactacggcatttggtagttgggaacctagaatgctactcctatgtaactaagaattgtgctttccaaatgccagagtgttcctgytgagaaatgtgactatgaacagcagtgaaggaagaatacatgttccacgttttcaagttgctttctttagagacacagataaatatgggaagttggtaaattcagcatacgttttctcataagaatgttattacaggctctatgttctcagcctactgcacaaaagtccatttaacctataatgtcgctgaattataataatgtagttgtgcagctggattctgttacactgtaatattttccttcaacttaaaatttaaaaaacttttaattgtggtagaatatatataaaatttaccatcttaaccatttttgagtatacagctcagtcttattaagtatgtatatgttgttgtgcaaccaatctcaagactttctcctcttgaaaaactgaaactctgttcccattaaacaacagctctctattctccccctctccycagctcctggtaactaccattctgctttctgtttctatgaatctgattactataaatacttcatataagtggaatcataaaatatttgtcgtttttgtgactggcttattttacttagtaatgtcctcaaggtttgtccatgttgcagataatgtcttcaaagttcatcatctatgttgtagcatgtgccagagtttcctctttaaaggtgaataatgtttcttgtgtgtatatgcctgtgatttataatatatatatttggtcttccactccatttcctggcatacaactcctaaaatccttagaatctccaaagtgacattttgtatgctaatgagatgactaatggtagggggctcctaggtagcatcaggatcagggctggcctccgggaagaccaagacatgrtaggagagttgggattttcacccccattcctcaacctctggggagggcttgggggagatgatgctaaaggttaagtttatcttaatggccagtggtttaatcaatcatgcctacataatgaagcctccataaaaacctagaaggacagggttcagagagcttccagatagctgaacacttggaggttcctgaacacttggagggtgatgtgcctgggaattgaagctctgagccccttcccacatacatctctttatctgtatcctttgtaatattttttctaataaatcagtaagtgtaggtaaatgtgtccctgggttctgtgagcagctctaccaaattaattgaacccaagcagagggttgtgggatgcccgatttctagctgatcagtcagaagcrcaagtaaaaacaactgtgactggccacagaaatcaggggcagtcttggggactgagccctcaacctctgggatctgaagttatcatctcccagtagatagtatcagaattgaattgaattagaggacacccagttgatgtctgttgcagaattgattgcttggtatgtggaaaaaacctcccacacatttggtcacagaagttttctgtgttgattgctgtggtgtgagagcaaaggaaaaagtttgtttttttctactcaatgctacattttgatcattcattcattgattctttcaactgtatttcaaaaaattagaaatttcagaaaagttggaaagataatattaatattgtgaatatctttatatccttcacctagattcatcacttgttaacattttgcaaaattttcgtctctctccctctctctacatataagggagatagaattgcaaataactgtaagatgtggtgggtgtgatttttttctatgactaaggatctttgagcaccaatgaatttttgaaagagtagttcctgtcatttttgagacttgcctatggcaaattatactggccttcatccccagtattttggaattatctgattctgctattggtatatattcatcatttcacttgttcatttattcacctaacaaaaatttgttacatgcttaaattttgcaaagctattaagtaaacagagacaggtacaacctgttttgctttcaaagaattttcactctaagagaatttagtgatctgcctaaagcaaaacatttataaattaaatctgtatacarttaattgaaggtaatagaaaaccccctgacaatttaaaaataaattgttaaacttgttgcttgatcttttatgtacatacttccaaataaatactaatttccatgmctttttcaggcataactctaataatgacatattcatattctaggtttgggttggtaccattgggtcaggccccaagggtcggaatctctgtgctaccttccagaatactgaaacatttgagttccaagatgaagtgggagcacttttgttatctgtgtgccagactgtgagccaaggaattttgtgtttcttgccatcttacaaggtaagggaatatttattgtttcttttgcctttaaataatcatttacattttaaacattggcatgctaattttaaaattaccacagtaagcttcctagggtagaggcaacaaggtaataactatagttttctaaacatcacatattattttacttattttttgattaagatactgcctgattgtcctacctctgttttacttaaaagtctgaaagagcaaggctggacgtggtggctcatgcttgtaatcccagcaggttgggaggctgagctgggaggatcacttgagcccaggagttcgagaccagcctggagaacatggtgaaactctgcctctacaaaatacaaaaattagctgggtgtggtggcacacacctatagtcccagctacctgcgaggctgaggtgggaggattgcttgagcccaggaggttgaggttacagtgagctatgattgcacccctgcactccagcgtgggcaacagaataagactctctctaaaataaaataaaataatctgaaagaataaaagtcttcaagcaatgttaattatataggagaagtgtttatgtgtacatttttattcttagggacaagtcgatattttcagagtagaaagaaacagagcattcttttttattttcataaattacatttctgaaggtttcattaaagttaatctaagccaaactttcttcgttgccctcattttacttcatgtatctggccagaagaattttgttgttgtttttagagtcactgatttttaataattttttttagttaatttgaaattatttagtatattttggtcctcctaacattcaaagcattgaaaccacttataattcctgaaagtaacatcacattgcatcaaaatctaacctaaatccaatgtagagaagtggcgttcccttctcttttttccacaggaagttatacctctaaggacagaagcatttggaagtaatatatttgaatgacaatattgatacttttgactcttctactgtctttttatatatatgtactttgatagctagggatacactaaagcaattagtctcttgtagataaattaaaggatttgttttcaaaaacatatttaatcagataattttttacaagaatatctaaaaataaaacggacataaacattttttaaaattcttaatggaaaacaagatttattccagtgtgaacatctacaccaaacagttatatttaggaaaactagtaattaagcttgatactaagtcatacaataaaacttgtagggagttggtcttacctaataaaatttttaggacttttaattcttaaatatggagacaaatatcttccgggaaattggaagaaaagttatttatgggattatggaaactgtactcactccacagttatgtaagcgattaaagcaaaatcttatttcattgctaaaacctttttatattttccagtcatagtcacaaaaagggagataggagatgtctgggtgacatttttctgctaggcttggaatgcatatagcagacagtatgaattttagttacagacatttataattgggtgactagagactataacattgaaataactttttagtgactgtatatatattagcaaaatgaatagattatttttctgcttctagcttttcaattaaaaataaagacacaggaaatccttcgaatatactttgttccaattgagtttatttctttgattgygaaattaattgttctgcaggtttttgtttaatttttttgtggcttaaaacagtaaacatttattatctcatagtttctttttttattattatactttaagttctagggtacatgtgcacaacgtgcaggtttgttacatacgtatacatgtgccatgctggtttgctgcacccatcaactcgtcatttacattaggtatttctcctaatgctatccctcccctaggcccccaccccagaacaggccccagtgtgtgatgttccctaccctgcgtccacatgttctcattgttcaattcccacctatgagtgagaacatgcggtgtttggttttctgtctttgtgatagtttgctgagaatgatggtttccagcttcatccatgtccctgcaaaggacatgaactcatccttttttatggctgcatagtattctatggtgtatatgtgccacattttcttaatccagtctatcattgatggacatttgggttggttccaagtctttgctattgtgaataggctgcaataaatatacgtatgcatgtgtctttatagtagcatgatttataatcctttgggtatatacccagtaatgtgatgactgggtcaaatggtatttctagttttagatccttgaggaatcgccacactgtcttccacaatggttgaactaatttatactcccaccaacagtgtaaaagcgttcctgtttctctacatcctctccagcttctgttgtttcctgactgtttaatgatcaccattctaactggtgtgagatggtatctcattgtggttttgatttgcatttctctgatgaccagtgatgatgagcattttttcatgtgtctgttggctgcataaatgtcttcttttgagaagtgtctgttcatatcctttgcccactttttgatggggttgtttgtttttttcttgtaaatttgtttaagttctttgtagattctagatattagccctttgtcagatgggtagatcgcaaaaattttctcccattctgtagggatgggagcctacagaatgttctgtaggctgttcactctgatggtagtttcttttgctgtactgaagctctttagtttaattagatcccatttttcaattttggcttttgttgtcattgattttggcgttttagtcatgaagtccttgcccatgcctatgttctgaatggtattgcctaggttttcttctagggtttttatggttttaggtctaagatttaagtctttaatccatcttgaattaatttttgtataaggtgtaaggaagggatccagtttcagctttctacatatggctagccagttttcccagcaccacttattaaatagggaattctttccccattgcttgtttttatcaagtttgtcaggttttgtcaggttttgtttttgtcaggtttgtcaattagttgttctgcaggtttttgtttaattcttttaaaatttttgtttattgtctgcttgtcttggttgtatttgtcttttyaattgatttgtatgggcttttaaatatatagtgtggatagtaatcctttataatacatatcattaaaaccttgttgtttgtcattaaattctttaatttcttttttagctttaaatatcttaatttatcaaaataattcttatacataattaaataatgttagaatggttataatgaaaaaacaacagctcccttcactatactactcctcctttcttcccagtcccacatccccagaggcttcgcaggtctttgatttatttttctgatatttattgtcatttctaattgtggtgaaacatgcataacaaaatttaggttttttttttttttttttttttttttctgagatggaattttacccttgttgcccagtctggagtgcaatggtgtgatcttggctcactgcaacctctgcctcccgggttcaagtgattctcctgcctcagcctcctgagtagctgggattgcagtcatgtgccaccacacccggctaattttgtatttttagtagagatggggtttctccaggttggtcaggctggtcttgaactcccgacctcagatgatctgcccgccttggcctcccaaagtgctgggattacaggcgtgagccactgcgttcggccttagcattttttgtgtgtgtacaattaagtacattcacaatgttagacaaccaagaccactatctattttcagaacctttcatcataccaaataagaactctgttcccacaaaataactccccagattccttttccccatttcctgttaccctctagtattctttctgtctctgtgaatttggctattgtagctacttcatataagtggaatcatacagtatttgtcctttgtttctgatttatttcattagccataatgttttcagggttcgtccatcttgtagcatacatcggaatcctttttatggcagaataatatttcattttatatatatatatatatatatatatatatatatatatatataatctcacatttgcttatccattcatctgtcgatgggtatttggattgtttctaccttttgcctgttgtgaataatgctgctatgaacgctggtgtacaaatatctatttgtgaccttgctttcaattcattcggatatatacctagaaatgtaatttctggatcttgtgataattctaaatgtaacttctttttttgagatggagtctcactctgtcacccaggctggagtgcagtggcatcatctcagctcattgcaacctccgctttccaggttccagtgattctcctgccttagcctcccgagtagctgggattacaggtgtccgccaacatgtctggctaatttttgtgtatttttagtagagacagggtttcaccatgttggccaggctggtcttgaactcctgacctcaggtgatctgcctgcctcggcctcccaaagtgctgggatcacaggcgtgaaccaccacgcccagcctaaatttaactttttgaagaaccaccaaactgttttttttatagtcaatgcataatttagattcccatcagcagtgcacaaggattccaatttttccacatttttgccaatacttgttattttatgttttttttgataatagcctttcaaatgggtataaagtgtagtatctccttgtggttttgatttgcagttccctgatgactagtgatgttaagtatattttcatgtgcttattagtaattcagacatcttctttagagaaatgcctattcaaattctttgcgcatttttgcattgagtcatttttagtatattcacaamgttgtgtaatcatcaccactgtctaattccagaatatttttctgaccccaaaaagaaactcctaactcattaacagtcactgcctactcttacctgctattccctagtatccactaatctgctrtttctatagatttgccttttctgaacatttcatctaaattgaatcatacaatatgtgactttttgtgtctggctttttcacatagtgtaatgtttccatgttcagcattataggatgaattaatactttattcctttttatggctgaataacattccttttactttcaacctatttgtgtctaaatttaaagtgtgtctcttatagacagcatatagttggagcatttgaaaaattcattctgcttatctctgccttttaacttgagtgtttactccatttacgtttaatgtaattagtgctaaggtagtgtttacaaatgccactttgctgtttgttttctgtatatctggtgccttttccccctctatttctctatcattgccttttgaatctaatagatagatattttctagtgtgccatttaaatttttctaatgtgtcactttaattcccttggcttttcttttactgtgtattttttagttattttcttagtggttgtcctaggaattatatttaacatcttatgtagtttggattaatactaatttaattttcaatagaatgcagaagctttaatcctatgtagctgtttttttaatcctaccttctttgtgtcattattataaaaattacatctttacacattgtatgtctctcaacacagatttacaattattaccttttgcaactgactttcaaatcagataaaaaaaattaaaaacagaatacattttatattgtcttttgtatctatgttaaaacacattttatactgtcttttataactaccttgtagttatcttgaccagtgctctttaattaattcttaatgtggacttgagttactctccaatgtccctaaaaacttattcttaaatagaatctgagccttgcagctgtctctctctgttgtaatcctctgctgttatactggagccctgttgatgtggtggtaaggtatggggaacaggaagcatcttctaatcctatgattatgtctcagtcttttagcatgactgtgtcccttgcctgtgaccttcacaagtgtttctgagctcttcattcatatcataagattagatggcagggagctgcagtttaggaaatgatcccttccctcatgttggataaggatctggtaaaatcttccttactggcagactggccattgttttagagaatgcgttgaacgtatttcaaaatggttgtttttttccctcctcctgcccgaaacagtagggtttttcttggctctttactgtgggaacctggtgggatttttagaggtaatgtcttaaaaattgtgggccccctggcaagactgcagcccctaggagtttctcacttataaactagttcacattttatctccagcaattcatcaatattatcttttaactatttctgtcaatttatgttttagtggccgctgtcccagtaagcatatcttgattctctgtatttacctgtctctccagatttcagggtggcagtttgccttgtgacctcagttctcagatggatcccagaaaagtaattgatttttagtttgtttaacttttttctgttgtaaaacaggtgtgatgacttccagttctttacatattggagctgaaatcagaagtccaataaaattggcaaaaataaatttgctactgagtttcagaatctagtcataagagcaaactagcacattattataatcttttgtcagtaccgttgtcaattctcacatagtacagtgactacagttattaaatgtattaatattatgccatctagttttcatttcagaggggtttgatactgaccatgcagaagacagaaagcctacattagaattcatttcagggggacatgaggaaccaggattgaaatataattagatgggttgtattagttctatgttgctgcataacaaattaccacaaaattagcaccgtaaaacagtacacatttatcatcttactctttctgtgggtcaggagtctgggcatggcttatctgggtttttcttctcagtgtattacaaggctcccagcagagtcaactggggttgtggtctcactaaaggcttgactggggaaagattagcttccagggtccctcagtttgtttgcagaatttatcccttgtagtcgtaggactgagtgagatacccagtcttttgcgggctgttggctaaggatgactcttaggtcttaaaggttgcattcaggtccyagtcatatcrccctctcaacaacgtggcagcttattactactactacttttttttttccttcttcaaagccaacaaaggtgtctcttctgtaggggtgcattgtatcttttaaggacttttacctgattaagtcaggtccacccaagataatctcccttttgattaactcagaatcaattgaggtagaccttaattacgttcataaaatcccctcatctttactacataatataatctaatcatggaagtaaagtcttatttttatctcacaacggggagaagtttatgcaggttgtatatagggagtaggaatcttaggggctatcataaactttttatcacaggggttaatttatcagggtaagaaaaaggttaggaagaaccattagaataaagatttgtgactatggcatatgaaaatattaatagaagtgaaatgatatttatgaaatttaggtagcaaaggcatcacaactgcacataataatctttccataaatgcttgatgaataaacacacgaatggatggagactaactcttattgttccaagtctttcttactgcctttgaagttagaggtattttagaactgcaaactaaaattcctgtgatttcccgtagagcaatacagcctaattccatatactaatacttattttgtattgagaaagaactttaaatatctttagttgaatttctttaaaataccaaaatatttatattgagagccttgcttatattatatttaagatcttcctgagaaatctcataactttacttcacatttatttttatttacttaatccattgaagaaatcattattgagtacatactttgtgcggaggactgcactaagtcctgttaaagattcaaaaataaacaagttactgtctcttcaagaagatttcagtttgggttgtggtataaaataagtgtacacatccttgcattatttgacaaaatttgtaatcattagagagattaagaagaatgataatggaattaagagtaggaagagatcacatgtgattgaatgaagcagaggagtttcctagaggaggtggttgatatttcagtgggtattaaagaaaggtggatagatttctactggtagatgtgggagtgaggaatataatattctggaccaaggagacatgtattagcaaaggcacagaaaatattttcataatcacagagtttagcttggcatgtgtgaaaatgtaatgtaaagactggttgcagagtttcataaaagaaacataggataagggccaggtgcggtgactcacacctgtaatcccagcactttgggaggccaaggtgggtggattgcctgagctcaggagtttgacatcaggttgggcaacatggtgaaacctcgtctctactaaaaatcaaaaagaaagaaagaaacatatggtagaagtctaggcccagtgcagaagcctataatcccagcaatttgggaggctgagataggaggatcacttgaggccagatgttcaagaccagcctgggtaacatagagagacccagtgtttaaaaaaacaaaacaaaaaatatcagccaggtgtggtgttgtgagtcccagctacttaggaggctgagatgggaggatcgcttgagcccagaagtttgaggctgcagtgagctgtgatcacaccactgcactccagcttggccaatagcaagaccctatctctaaaaaagaaaaatatatgtctaaagtttttcaaaccatacattttagtggtcatttcttcccccttatatttaatggccagttttcttcctgtactagataattggaatgggtgatttactcaaaactttactctttcactgagtaaaaactaatattcttttgatgtaaactgcagcatttgtttaagggtaagagtgagaacgttgttcatctagtttttttccccacattctttcagaccaatagtttatggtaactaggaggaatgccattcttccactaagataaatttgattttgactctgttgttatttaagtagtagcagcattgctttagaactctctgaaattcatttttatgggtagaagagtttctaaactctttatatggacagagaagtttctgtccatataaagagaatagaaacttttctattaaatcattttgaaaagagactctctggtgccaaagtaacaagttggatctttttattcatacaatacagacttcgacttaaaaaaaaatacatctttatgagtaatatgtataaaccattttccctgagggcatattttacattcatcactgaatgtcagatgaggaataaaatgcaaacattcctgwtcactctctagctgtagttttttaaagtattgttcagcactaaatttgtatgttaagaaatttgcagtgctactagtttgttttggttctcatttttaaagctgtaccgcacttaacctaaaggagaaactaaattgctacattaaaaagtgttttttttcccctcgtgtagaaggctgaaatttctatagatataaatttgctttaagtgatcaactgagccttttgaagaaatatttttttctacagtgttaaatagaaagaatcattatgccattgaggctttgggatgtggtagagaggttgtatatctctcaggttagatgtagttcttgagaacttctgctcttggttattaaacaaaaagtattcctttgtttgttcctttgtttattcatttgacaaacatttactgggcacatactacattctgagtagacaattcatatggctaaggtcatacatttaattagtgaaagcatttgccttagaactcctgattttctagttcaatgctatcctcgtaatagtattctactgtttgaaatatagttgatctgataaatattaatttgacctattatttttatttagaacaatatgcacttatataaaaatacctacatattggtatacctatatttatgtttgcttttcacatttgtttttgattatgagctaaactgttaggaagatagatataagagctactctgaaagaggatgttaaaaagctgctttaacaattgaatgaaaatagtagggcagttggaaagtaacaatttaataaccaagttgttttttgctctgtgtgtgtgtgtgtgtgtgtgtgtgtgtgtgtgcatgaatatagtcatttatgtactttctataaataacatgaatatatttgtatcacatctggtttcaaaaaagctttataaaaatatattgattaggctgggcatgctggctcatgcctgtaatcccagcactttgggaggccaaggagggtggatcacctgaggtcaggagttcaagaccagcctggccaacatggtgaaactccgtctgtactaaaaattcaaaattaaccggacatggtggcacatgcctgtaatccctgctaattgggaggctgaggcaggagaattgcttgaatccaggaggcggaggttgcagtgagccaagatcacgccatgcactccagcctgggcaataagagtgaaactctgtctcaaaaaaaaaaaaaaaaaaaaaaaaaaaaaatatatatatatatatatatatatatatatatatatatatatataatatatacacacacacacacacacatacatatgtatgtgtatatgtgtatgtgtgtgtttatgtatgtatatgtattataatttttaagtgaaaaatctagggagaataaaggcagagaagttaagattaaactagagtcaaggatgtccaggtaacttagtttgagaaggcagtgtcttggtcaattttttgatgctataacagaataccacagactggacagaaagaaaataaatttatttctcacaattctggagactaagaagtccaagtatcaagttgccagcatctagtaagggccttcttgctccatcatctcgaggtgaaaggtgaaagggcaagtgacacagaaagaaaaagctcctttattttttaaaggcattaaacccatccatgaggacagaacctttctggcctaatggtctcttaaatgctgcacctgttaatactgttacaatgacaattacattttaacatgactttgggaggggacattcaaaccatagcaggcagggatcaagtagcaaatttagaagctgaattcatcctaactccctgtgctccccccacccccttagttctaaactatttttcatggatgtaaggataaatataggaagcacttttgggaaatgacagacaaattagttaaatataacttatgattaatttactgtacattttacatattaaagcaatttttgagcttgatatggactagaaaaacttggaggttctagttgtttcatcttggttacaatctttaatatctacccagttaatcttcataatagcaaccaattgattttcctttttggctgacagtttcatattggcaccttttgaatttagatgatttgtgtggtgtcaggagggacgttaacttgatgcagtggtagtctccaaatatacttatcccagaggtcatgggacaaaaaagtgacaccacattgggatgcttgaatcatatagtttagtaaagatagttaaaacacacagtgggaggcaaggggagagagttgagggtaggttaacatgtgaatacaatgtaagtgggtggaaggaccacactacctaaatcctgggctgtgcaatgtttatgtcttgtctttctcttttccacatcagctctcctttgctgatggtgtgcttacagagactagaaatgaggtttatgcaaggggacccaacagatgcacaattgacacactttattagagtaaggccagcgcaaatgcacttggccacagctgtagtccatcagtttgcctgctgagctacaatgtattttatttgcctttcttgggcagaggatacatggagccagaatgggtgtcaccaatgggtggctgaataagattttatggatattgggtagtattttatatgcctcagatatatttaatgtatcttggatatttgatacctcatgtatatgtagtgtatcttgaatatctagtgtctttccatcctttttcatctatgttcatagagaaatgctgtacttactttatctctttaatatggcttacacaggtttctaacttctagctaygattttaacattttaagagtttcacccatctatttgggttcttgtattttatatattctcaaatatacagcagatgcaaattatagaagcgaactctcccaatctctagccttcgattttaagatatctagttaactcaagggttattgcatttttgaaaagtctttcaaaagatacatcagtctctacaggacatggtgaatgaatggttagagctcatatcagtgcgttggttgtttgcctttgtacaaagtactatttctgaggagtttttagaaataagattcaccttgcttgcctagtgtagataatgttagcttgaagtcatgctaacatgagagatcataaaggaaaaaagtcatcaaggaaaagattctacagatagcagctcaatgtagagaataccataggtcacatggtattttttataccagttttaggttcacagcaaaattgagtggacagtatagacagctctcatatacccctttacccgacacatgcacaaccttccccacattcccataccagctgccctgtgtctggacttctgacctacagagactgtgagataataaatgggtatttcttttcatgctacaacatggatgaatctggaggacattagactaagtgaaataagctcgtcataaaaacggcaaatacactattacacttatatgaggtacttagagtagtcaaattcagagatagaaagtagaagggtggttgccccagactctggtaactaccattttactgtcacttctttgagttcagttgttttagatgccacgtaaagtaagggcatgagacatttatctttctgtgcctggcttatttcacttagcataatgttctccaattccagccaaatgaacaatgctacagtgaacgagggagtgtagatatttcttctgcaaactgacttcaaattttaggggtaaatactcagaagtgagattgctagatcataaggtaattctgttttgagtgttttgagtaatgtccattcagttttttataatggctgtactaatttacattcttaccaacagtgtccaaggcttcccttttctccacatcctcaccaacactttgttatctttcatctttttgacagtagccattgttacaggcataaggtaatgtttcatcatggttttaatttgtatttccctaatgattagtgattttgagcattttttcatgtatctgttggtcatttgttgtcttcttttagaaatgtctattcaaatcccttgcccatttttaaattgagttatttgtgttcttgctaatgagttgtttgagtttcttatatattttggacattaactccttattggatatatagcttgtaaatattttctcccaatctgtaggttgccactttgtttattgttttctctttgttgtaattgcattggcctatttttgcttttgttgcctgtgcttttgggatcaaatccaaaaaatcattgcctaaaccaatgttatgtagttttcccccctctgttttcttctagtagttttacagtttcagttcttgggtttaaatctttaattcattttgagtttttttttaaatattgtgagataagggtccattttcattcttctgcatgtggatatctaattttcttagcaccatttttagagagtctttttttcccattgtgtatacttggcacctttgttgaaaatcagttgagcacatacatgggtttctttctgtgctctttgtttcgttggtcactgtggctgttttttatgccaataccatgctgttttaattactatagctttgcagtgtggtttggaatcaggtcgtgtgatgcctccatttttgttctttttactcatgactgccatggctattcaaagcttcttgtggctctatatgaaatttaggattcttttttctatttctatgaaaaatgacattggaattttgatagagattacattgaatcaatatgtcactttgggtaatatgaacattttaacaatattcttccagtctatgagcaaagaatatcatgctatttacttgtatcttctacaatttctctcatcaacattttatagatttcagcgtacaagcctttcttcaccttggttaaatttctttctttctttctctctctttttggtagctattgtaaaaggagttctcttaatttcttttttggatagtctgttattagtatatagaaatgctactgattttttgtgtgttgattttgtatcctgcaagtttactgtatttattcatttattagttctaacagttttttgttgtagtctttaggggtttctatatataagattatgtcttcagcaaacaggggcagtttcacttttttcttttctatttggatgctttttatttctttctctttctaaatttttctggcaaggacttcagtactgtgttaagtggacatagtgaaagtgggcatccttgtcttgttccagatcttagaggtaaggctttcaattttttcaccattgaatataatgttaagtgtggtcttatcatatttggcctttattggccaaatatgcagtacatttcttctatacctaatttagtaaaagtttttctcaggaaaggatgttgaattttgtcaaatgatttttctacatctaatgagatgatcatatggtttttgtccttcattctattaatgtgctgtatacatttattgatttacatatgttgaactatctttccatccagtgataaatcccatttgatcatgttgaattgttcttttaatgtgttgttgaatttggtttgctagtattttgttgaggatttttgcttttctatttatcaaggatattggcctacagttttcttttcttgtattgtccttatctggccttggtatcagggtgataatgctggtcatgtaaaaagaatttagaagtatatcctccttttcaacttctttgaaagcatttgagaawgattggtattagttctttaactgttaggtagaattcagcagtgagccaacaggtcttgggcttttctttgattggaaagaactcattattggtctgtttaaattttctatttctttatgatgcagtcttggtaggttgtatgtgtctaggaatttatccatttcttccaggtatccagtttattttgttggcatataattgtaatagtcactttgatcctttgtatttctgtggtatcagttataatatctcctcatttgtttctcattttatttgaatattctctttttttcttgttaatctagctaaaggtttgttgatttcatttatcttttcaaaaaccaattcatagttttgttgatctttgtgttgttttcctagtctctactttatttatttattctctgatctttattacttctttccttctgttaattttgggcttagttcttctttttctagatccttgaggagtaatgttatttatttgggatcttcttttttgatgtaggcatttgttattgtaaactttcctcttaggactacgtttgctgcatcccttaagttttggtatgttgtgtttccatttttgtttgtctcaatatattttttttaaatttcccttttaatttcttcattgcccccttggttgtttggttgttcaggaacatgttgtttaatttccatatatttgtgaattttcccaaattttcctgttactcatttctagttttataccattgtggccagcaaagatacttgatatgataacaaacttaaatttgttaaaacttgtttcatggcctaatatataatctatcctggagactattttatggtatttgagaagaatgtgtattctgttgctcttgaatgggatattctgtacaggaataccttattttattgtgctttgctttatcgcactttgcaaatattctgggttttttttttttcataaattaaaggtttgtggcaaccctgtgtcaagcaagtctattgtcaccatttttccaatactatgtactcacttcatgtctctgtgtcascatttttttagcaataaagtattttaaaattaaggtatgtatttttttagacataatgccacttgtacacataatagactgcagtatagtataaacattaaccgtttatatatgatgggtaacaaaaatgtatgactcactttattgtgatatttgctttattgtggtggtctgaaactgaacctacaatatctccaaggtatgcctgtaaatgcctgttaggtccatttggtctaaatttattcaagtccaatgtttttaaatatattttctgtctggatgatttgttcattgttgaaagtggggtatcaatgtctcctactattattgtattagaatctatctctcttttcagatcctttaatacttgctttatatatttaggtactttgatgttaggtgcatgtgtatttacaattgttatatcctcttgatgaattgacctttttttgttaaataatgttcttcgttgtttctttttacagtatttgacttagtctattttgtcttatgtaagtatagataaccccactctcttttggtttccattttgttgaatagcttttttcagctgctcactttcagcctctgtgcatccttaaaagcaaatctcttgtaggcagcatatagttggatcttcttttcttactctttctaaattgctctgggaattaagactctatgtctttttgctagagtgtaattcatttacattcaaggtaggtattgaaaggtaaagagttattactgccatttatttatttatttatttatttatttatttatttatttawgacagggtcttgctctgtcacccaggtcagagtgcaggggtgtgatcataggtcactataaccttgaactcctgggttgaagggatcaacctcagcctcctgagtagctggtactacaggcatgtgccaccacacccagatacattttttaaaaacttttttttttttagagatagggtcttgctgttttgcccacactggtcttaaactcctggcttcaagcaatcctttggcctcaagcaatccttctgcctcagcctcctaaagtgctggaattacaggcatgagtgaccacgcccacccagcattgtgaattattttctagttgttgtgtaggtactttgtttctttatttctcttgctgtcttcctttgtgatttgatggtttcytgtagtggtatgccttgaggcctttctatgtttgttatgcactgcactgtaatttaaatatttttcttttggatcttattcactagattgtgaagcgatgctttctccaaaamatttctttcaagttttagagcaacaaatttacagcagattcagatggcaatacttgaaagtagtaacttttaggtaacattatagtggttgcttcttattcatctgcttccctcagcctgaattctaatagtgcaagagcactgacytcattatagtttaattattagcccatttacagaagtatagaaaacgagttgcctttttcgcctacagttaatctattcaggaaaagaatgaaacatatagttgaatttgtgtgaataagtttatacattcagattttagccaacattattaactcagtcaacagttcttcatttttaaaaagcaaaacaagtcagattatatacattttaactaaatgattactttagacattgatgaattaactgttgatgaaacaacagtaattcagaatttatgtttcaaagagttaagaatttgttccatacataacatagtattgagttcttattgttttcttttcttttttctctttttttttttcaagacagtgtctcattctgttgcccaggctagaatgtggtggtacaatcactggctcactgtagtctttacctccctggctcaggtgatcctcccacttcagcctcctgggtaactgggactacaggaacataccaccatgcccagttattttttttgtagagatggggtttagccatgttgcccaggctggtcttgaaatcctgagctcaagagatctgtctgccttggcctcccaaagtgctgggattacaggtgtgagccaccgcgtctggcttttattgttttcttttcacatgatttcaggaaagtagaatttcatgtgtaaatatgttagttgttttacaaatgtcattttttgaagttttttgcattgtaaatatcattgtatatttttatcagaatgtatcaagaagtaactgtaaatcaggtgtcactagtgcattactgcactagtagtgcagctctgacattttcagagtcctcagtattttaactaatttatgagagagagtgttccttttcagagagggctgtaggatcttcatttccagttagattgccaacagaggtcttactttcactttagggcagtatttgtctatattattcctccaagtgcacctccaactgcacctgtgttcattgaaagtttgattctgaaatataacccagcctcttgaggtgaaagtgctgagtcaaatatcaccaaacaggaagctgtttcaatagaaattcatattcttggttttcttatattttcagtttgtatttagcaaaaattaaggacattcatttttactgtaactaaaaaagttatttaaaaaacactactactttttcatttttattagtatttaaaaggaactcttttttatttctaacatatgccacatatgggtacatatcaactgaataaaagaaagtaaacatttaaaacatatgagtacctcatgaaatgaataatgaagaatcatctttagatggaaaaatataccaggttctacttatgaaataaattatgtgagtaagattacaaaagatggtagtctgtttaggcaggcctattaaaagcattaagacttgagtactggctattaaagtgagtaaatggcaatattataaagttaaacacatgccaaaaaacattttccagaggactgggattgtaacaataccactaatgagggcaaagaggtcttaatgcaatttgcactttctaaagtttcaaaaagaggctttgagttagtgtattattaatgtactgaacatctggaactgtgtaaaagctatggacattgagcaaatgcaggatttccccactaggttgcattctaacttattccctccctagcgaaatactagttttaaagaagtttgacaaagtaaaatgacaatatccagataagacatgggcattctaaagtgtcttttagtttgtgagatctgactttwaaaaaaattgcctctgaggttaacaaattgaagtgatgtgaacaccaattagtaaattaaatcatctctatcactatatgttggctggtctccctatatgaatagtatttaccctttatgagctattaagtaggatattttcaacaaagatacctcacatttttcatatatgtaagccataagacctgagagacagctctgtgtcatcgtactttcctttaagttagtttttaggtgcctagttaggatacctaagagaatttaacaattgagttatttttgtgtttatttatgtgatttctctggcaagacagaaatagttaagctgtctaaatgtgtaattcaagtgtcacctgcaatgagaatataaaagctgtagacctaaatattttgttatctgaaactgaaaatttgctgtaggccattttcactaaaataaccagtatgtttttgctatagaattgtactccaaatttgcatgtagcccctgtgtaatccttaacaaaaggttttaaggtactttaaaaaaaatctccactgaagaaattaaaataaaacacattgtgttctgtggaaatgtgtcatagtcaccaaattctcccttttatgaagtgttcctcatagctctttgcccgaactaaaatccggatagacccagaggacataccacttcgtcagaccttccaaattgtgaccatcctttcctctcgtaacttgcagtatctcagacttagtatcctatttactctccattgttctttctaaatctttacctgtctgttttcttccggaagggaggggagaagaaaggaagggaggaaggaatgaatgaacaaagtctcaccaagagaaaactagtctagtctagctagtctgtttgctcatgtcttttagtcatacccttctttccccctcatctttgtcatcttacaaagcatctggatactcttatttttaatattttatttttatttgttttttcagatagggtctcactctatcacccaggctggagtacggtggcatgatcacagctcagtgcagcctcaacctccagggctcaagcagtcctcccacctcagcctcctgagtaactgggatcacaggcacacaccaccacacccagctaatttttgtacttttgtagatacagggttttgccaagttgcccaggctggtcttgaactcctgggctcaagtgatcctccagcctcagcatctcaaagtgctgggattacaggtgtgggccactgcacccagccaactcttcttttattaaggacttgggcatctggttttacagttatgttttacccctccctactctcctccctgaccttccattgttttggaccttcatttttcattcatttataaaattcattcaaaaagtatttactgaccactttctatatgtaaggtactgttctatgcactgggcaatcagcagtaagtaaaacagacaaaaatcattgtccttttgtattccagggtgagagacagaaaataaatgagagacacagaaagctactaatatgttagatgatattatggactgaatgtttgtataccaccaaattttttatgttgaagccctaacccccagtgtggttatatttggagatggggcctctaaggaagtaattgcrgttaaatgaggctgtaagggccttccttatctgataggattagtgttcttataagaagagacaccagaaaacttcattgctctctctccctgttcctctctgaatagagaggaaaggccatgtgaggacacagaaggtggctgtctgcaagccaagaagagagccctaaccagaaatcaagttaacaggcacctttatcttggacttcatagccaagaagtaagaaataaatttctcttgtttaagccactcaatctgtggcttaaactaataactgtaagaaataaatttcttttgtttaagccattcagtctgatatttttgtgtggtagcctgaggggactaatacagatggtgataagtgctatgtagaaaactaaagcaaggaaagggggaaaagaggatcctggggttggaatttttttgggtgggggctggagggtgctcatttagaatttaattggatggtttgggaaggcctatctgagaaggtgacagtgagtaaaagtgtaaaggaagagaggaagcaaaccattctgatttagggggaagaatgttcagatagtgggaatcttgagacaggagagtacctagtttgagcaaaaggaagccattgtagcagagtaggactgaagtatggggaattgaaggagatacggccaaagaaatagctgggtaaaatcacaccacagtaagaatttagattttgttctaaatgcagtaggaagccattggagggtttaaacttagttttaaaaggattatgttggctgctgtatggaaaatggactgtagagagcataggctgaagcaagggtgactgttaaggagtctgctgtaatctagatgatagatggtggtggcttggaccactgtggtagcagtaaagatagtgagaaatgtttagagtctagataaatttaaaagtagtgctggcaggatttgctgatgaattggatgagcagtagtagagatgaggggctgggtgtggtggctcatgcatataatccctttgggaagccaaggtggaggagtgcttgagtccaggagtttgagaccagccttggcaacacagcaagaccctctctggttttttgttgttgttgttgttgttgttgttttcaagccagacatggcagtgcatacctgtagtcccagctacttgagaggttgaggtgggaggatcgcttgagcccaggaatgtgaggctacaatgagctgtgatcacaccactgcacttcagcctgagcaacagagtgagatcccatctctaaaaaaaaaaaaaaatggagaggaaataagattttcttgctggtccccccttttaaatctgtactctcccactaggcaatctcatctctatacattcttttttagttttatcttttgtcatgctttcctaatatataattaaattctgacttcttccttaagtactatgcccatatacccaactgccatatcaacatttccatttggatatcttaaaggcaacaaacttttaatctttccttccagtcttggtcctttgccagtgttgcctgtatgaatgaatggtactgtcttagttcattttctgttgcttgtaacagactacctgaaactgggtgatttattttttaaaaggaatttatttcttgcagttacagaggctgagaagttcaagactgagaggctgcatctggtgcgggccttcttgctggtgggaactctctgctgagtcccagggtggctcagagtatcacagggcaaggaggctgagtatacaagctcgagtctctattcctttttgtataaagccactagtcccactcccatgataagccattaatacatgactggacaaatccattcatgagggcagcactcttgttaccctgtcacctcttaaaatcccccacctctcaatgctgccacattagagattaaatttcaacattttggagaggacaaatgttcaaaacatagcaggtactgtaatcatatttgggctaatcatatacctacagagcacctgtgaacctttttctcccttccctgtcatgtcccatccaacaccatatcttactcattttaattttaagtatttttataatctgttcacttttctttctctacagttaattttcaaaaagataaagtcatagctcacatataaagttaacacctatcacagattttattaaactcactgattaatgaagaaaaagtatgatgattggcctattcagagagcatttaaggattcacgtacttgtaggcaatttaataaaggaatagactataagaaaactggttgatgtactacagggcaataaatagtaacttttagggttatcttttctcctgaacagaaatgatttgtatttgtattagacaaaaatatctaagttgaaatataattttgctaagtctggaaccttaattaatagtgaacagtgagttcaacaaagtgtatttccctagataatcttctagtgggcctttgcctccatttgaaatggaaagtttgtactgtttcttttttatcttattctcaaggtttgcattttttttcttaactctttctaattcaagctaccaccatctctggattactatattagtagcctaaatgtacctgttataacccctcctctaactcatcatattaataatcagactaatgttgtttaatttttatattttatatttgtgaaatatgtgtgtatataagtctacaaaactaatatgtacattttaaataataataaaatggagatctgagtatccatcacccagcttaagaaatagaacattatttytacattagaagcttccatctggccaggcgcagtgggtcatgcctgtgatcccggcactttgggaggctgaggggtggatcacctgaggtcaggagttcgagaccagcctgaccaatatggtgaaaccccgtctctactaaaaatacaaaaattagtcaggtgtggtggtgtccgcctgtagtcccagctactcaggaggctgggacaggagaattgcttgaactcaggaggcggagatttcagtgagccgagatcgcaccactgtactccagcctgggtgacagagcgagactctgtctcaaaaaaaaaaatcctccatttgttccttcccaattgtatccccctaaagctaaaggtattagtttcatgagttttttaaagttatatatatttttctcaaagaacatattgtttttgaactttatataaatgaaatcatatttgttatctatctgtatttgcattttttactcaacatctagaagtttatgattcatcctggttaatatgtgagaaactagttcatttatttatgttactaaatagtattcatttgtgtgttcttttcaatttttaaaattgtggtaaaatacacatgacataaaatttaccttttaagcatttttaagtgtacaayttagtgccatcragtacattcatgatgttgtacaaccatcaccagtatccctttccaaaacttttcaatcatcccagtcagaaactgtactgatggaacaatgactcctgtttagccccttccctcaggccctggtaacctctgttctacttcccatctctaagaatttgtctattctaggtacctcatataagtgaaatcatataatatttgtactttgtgtacaaaaatacagtggcttttttcacttactatgggtttatccatattcaagcatttgtcagaatttcattcctttatagttgaataattttccattgcacgtaggtcatacattttgtttattcatctgttgattgacacttgagttgtttccactatttggttattgggaataatgcttctataaacatcagcatacagctgtttgtttggatcctagtactttcagatatttggggttatatacttaggagtggaattgctggatcatatggtaattctatgcctatgaacttttgaggaactgccagactgttttcctcagcagttgtaccattttacattgccactagcaatgtgtgacagttacagtttctgcgtgtccttgcaacacttacttatttggacagcagttatactaagtgaagtgggacttcattgtggttttgacttgcagtttcctaatgactaaggatgttgagcatcttttcatgtcctttgggcctttttttttttaatcattcaagaaatgtctattaaagtcctttgcctatatttgaatmtgtttggttttttcgttgttgagttgtagttctttatatcttctggatattaatcttttatcagccatatgctttgcattctgtgtactatcattttaactttcttgacagtatccaaaaaagttttataattttttatgaaatccgagtttatctgtatttttctttagtyacttatgcttttgatgccacagccaacaaatcattgccaaatccaaggtcataaagccttctatttttttcttttagagttttatattttttagctcttacagtaatgtctttgaccaatgttgagttaatttttattatgtaggcaaggtgttacttcattctttttacatgtggtgatccagttttctcaacaccatctgctgaaaagaatcttcatgcattgtttcaataatgcaaaaaagcatttgacaaaatgcagcacactttcatgatacaaattctcaacaaggtaggaatagaaggaaatttaatataataaaggtcatatgtaagaagctcgtagcatactcagtggtgcaaactgaaaggttttcctctaasatcagaaacagggcaaggatgcccactcttgccatttctgtataacgtagtactagaattcctagccagagcagttaggcaagaaaaaggaataaaagtcttccaaatgggaaaggaaaaagtaaaattgtccttatttacagacgtgatctttcctaaagatcttatttttaaaaaacctgttaggactaataaattgagtaaagttgcaatatgcaaaattaacatacaaaaatgagttgtatttctayacactgacaacaaactgtctgaaaagcaaattaggaaaacatttccatttgcagtagtatcaaaacaaatagaacacttaggaataaacttaaggaggtaaaagacttgtatattgaaacccataaaacatttctatatatactgttttattttgatttttatttccttttctgttttccacagtggctatactgttttatattcccaccagcaatacacaaggattccaatatcacaacatcttcactaatagttattttatttacttttttaaataatggccttccgaacagctgtgaaccaatatctcatcgtggttttgatttgcatttccctgataattactgatgttgagcatctttccatatacctgttaaccatttgtatgtcttctttggagaactgtctattcatgtcctttgcctgtttttcaatttttttttaatattgrgtttcttaatatattttggatattaaccccttatcagatatatggtttgcagatattttttctcatcctttaggttgcctttccactcttttttttccctttactttgcagaaaccttttagtttgttgtggtcccaatmgtaggttttacttttattgcctgtgcttttatgtcatatgcataaaatcattgttaaatccaatgttacaaaaattttctcctgtgtttttttctaagagttttgcagtttcaagtcttttttttttttagacagagtctcgctctgtcgccaggctggagtgtagtggcgtgatcttggctcactgcaacctccgcctcccaggttcaagcgattctcttgcctcagcctcccgagtagctgggactacaggcgcgcgccaccatgcccggctaattttttgtatttttagtagagatggggtttcaccgtgttagccaggatggtctcaatctcctgacctcgtgatctgcccgccttggcctcccaaagtgctgggattacaggcatgagccactgcgcccagccaacagtttgaaatcttacatttaagtctaatccattttgagtgaacttttgtgtattgtgtaagataaaggtccagttttattcttttgcatgtrgatattgtttgccctgaactatttgttgaagagactgtcctttccccattatgtatttttggcacccttgctgaagatcagttgatcatacatgtgtggatttatttccaggctctctattctcttccaatggtctatatgtctgtctttatggcaatgcaattactattttgattatggtgggtttgtaagatgtaagtgtcatgaagcacgatgcctctagctttgttgttctttctcaagattgttttgattattccaagtcctttgtggttgcatattaatttttgtatttttttctgtttctgtaaaaaatgtcattgggattttgataggagttacattgaatctacatttgtattagtctttaaaatcaatggtccccaaccttcttagcaccagggactggttttgtggaagacagcttttccacagacctgggttgggggtgggggtgatggtttcgggatgaaactgttccacctcagatcatcaggcattagattctcataaggagcatataacctagatcccttgcaagcacagttcacaatagtgtttgtacccctatgagaatataatgctgctgctgatctgacaggagactgagctcaggcagtaatgctcactcacctgccactcacctcctgctgtgcagcctggattctaccagtattctgtggcctgggggttggggacccctgctttaaatgtttcatagaggactgtgcatagtggctcacacctgtaatcccagcactttgggaggccaaggcaggaggagcacttgaggccaggagttcaagaccaacctgggcaatatagtgagactccatacctacaaaaaaaaaaaaaaaaaaattaccagggcatggtggctcatgcctctagtcctagctacttgggaggctgaagtaggaagattgcttgagcccaggagtttgaggttacagtgaactatgatcacattactacactccagcctgggtgacagagcaagagtgtatctcaaaaataaattaattaattagcaaagaaatgaaaataaaaaattaataaaattaaataaataaaaatgttttgtagaatcggtattgaggccatttaggtccttagcttttctttgatgggagactttttgttactgattcagtctccttactagtctgttcagattttctgtttcttcattattcagtcttagtaggttgtatattactaggaatttgtccatttcatctattttatccaatttattggcatataatttttcagagtagtcttttattgtatcggtggcatcagtgtgtcttctttcatttctgattttctcttttttttttccttaaccaatctaggtaaagacttgtcaattctgttgatcttttcaaaaaccaactttttaaattgtttttctgttccctattttatttctgctctaatcttaatatttctttccttctgcaaactttgtatttactttgttctttttctagttccctgaagtgtagaattgggttacttgagatctttcttttttaatgttggcattaccgctataaactttcctcttagtactgcttttggtgtatttcttacttgtggtatgttgtggttttttttccactggtctcaagataatttcataactttccttttgatttcttttttgacccattcattggttgttcaaaagtgtgttaattttcatatttttgtaaatttgctggttttctttctgatactgaattttagtttgattctgttgtggttgcaaaagatacctggtattaatttttatcttacatttgttaagacttgctttgttacctaacacatgatctgtcctagagaatgttccatgtacagttgtgaagaatatgtattttgctgctgttgggtaaaatgttctatatatgtcaggtccatctggtctctagtattgttcaagttccgtttccttgttgatcttctgtttggatgttttattcattactgaaggttagatatatgactttcctactcctcttatattgctgtttatttctctcttcagtacaatcactatttgcttgctatatttgggtgctctgatgttggttgtgtgtatatttatagttgttaaatattcccagtgaattgacccatttatcattatataatgtccttttttttgtctcttgtgacaatttttgacttagaatctatttagtatcttagaattgccacctctgctgtcttttggttaccatttataagtaatatctttttctatcccttcactttcagcctatgggtatccttaaatttaaagtgagtcacttgcagacagcgtttttatctatccagctactttatatcttttgattagaaaatttaatccatttacatttaaagtaatgaccgatagggaaagacattatcatttcaataattgttttctgtctaactacagcttttttgttcctctattcctcccttgatgtctttctggagaataaaaagtaatataataacttcttagctgtgtttatggaattaaagtagttcttcctatttaattaaagcatattgtacagcagttaactattttactaatgttttgttttatagtcttattaagaagtttatttctaaaaatagttaaaggtaaaattgaggaaataaactatcttataaaaattgatcagttgctgttttccagagaattttgggtggtttcttataataacttgtccaaattgtgtagaactcatagtatataacaagtggataaaacagttcaatttaaataataatctctaatattagcttttgtctttttcatttattcagctttattattaacttctttctttgcatttgctatatttcattttctagcttcttggaaagaatacttgattcttttattttgacattttaaaaataaatatatttaaagctataaatgtatttccatgtattgccattgctgtatgccacatgtttcgaattgtgagtgcttttcttattcataactaaagatttcatgagttatactgtgttttttctatttaactcatatggtttttaagaatatgagttttacagccacgtgtgttggttcacacctgtaatttcagcactgtggaaggctgagtctggaggatcccttgagaccagaagtttgagactagcctgggcaacaaagcaggatctcatctctacacaaaatataaaaattagctgggtgtagtggcatgcacctgtagtcccagctactcaggaggctaaggtggagggattgcctgagcctagtagttcgaggctgcactgagctatgatcttgccactgtactccagcctgggtgacagagaccctgtctctaaaatcaatcaatcaatcaagatgagtttttgttttgggcttgacttttaatctaccatgactttatattattgacttttaatctaccatggcataactgttgaaatatgtgatcaatatgataaggattgcttaaaatttgttgaatgtccttttgtaatctagcccatggctgtaaatgttccatttgtgcccatatattttctacttcttggctgagtctttatttctatcttttttcaatgcaggttattaatgatgatcaaatattcaaataatgagcttatctgcctatacacttagtaaaatgatcttaaatcatcttcatttgaagactatttaagaatattaagaaacttcaccttaggtttaaagagagaacttaaagtttgttaactttgacagaggttttttgttttttgcttttgcttttgaaattgccaagatagtagtagtagtagtagtagtggtggtggtggtagaaattgccaagataatagtagaagtagtagtagtaatagtagtagtagcagtagtagtggtagaaattgccaagataatagtagtagtagcagcagcagcagctaactgtgccagcaccattcagatctctctaaatctgttaataaatttaaccccataacagctctatgagatatattgttttcctcattttataaatgagaaaagacacagagagattaatatacttgccgtagtcacattggcttaaacaaatgaagttaagtttgtttagctagacacacaaaaaatcatttttttctttcccctctttagttattagaaaaattaaaagaacgttggctctctactggtttatggcataatctggagttggtgaagacagtcattgtagaaccacagggaggagaaaaaacaaattttgatgaattactgcaggtgtactatgacgcaatcaaatacaaaggagagaaaggtaactggaaattatttcatggtcggtgaaaaaatattttttattacaaagtaagaaggtacaattataattttatatttttagatgaattacacttaagagaaaaattataatcctgagtgaaaagaaaataaattgggtaaagaaattcttttaattgtacttgttctcctatgaatattttcacttgagtatgctgattcaactttaagaaaaacgatgccatcatctcacagtcttcagtgcactacctgaaatagtttgtgcaaaaaggcagttaggatatatataaatatattccttactagccaaatgagacctatattctgatgcatttagtacacttggtgcttgtattctattacataaggtaaacttgaattttcaaaacataactgaaaactcaattccaagttagagcatatccatgaagagtttgatgtgaggccgggcgtggtggctcttgcctgtaatcctagcgctttgggaggctgaggcgggtggatcacttgagcccaggagttcgagaccagcctgggcaacatggtgaaatcctgtctctacaaaaagtacaaacattagcagggtgtggtgcatgtgcctatagttccaactacttrggaggccgaggtgggaggattacctgagcccaggaggtcaaggctgcagtgagctgtgattgtgccactgcactccagcctggctgacagagtgagaccctgtctcacacacaaaaaataataaaataaaataaaaaagtttgatgtgaagggatagtagtagtttatgaacaatgcaagaaagaggtaatataacatatcagtatctttttatggtgtatatattatggtgttctctgtgtctgttttcaatacttttaaatatattgattccatatgatatgtattatcaattacaattatttcaattattctgagaattttactttcaggtggtaaaggtaataatgcaacttcaatttttattaaataaacctgtttataatcacacagttcatatgcaagttgctattctgacatgtttttactgtataagttatctggaagatgcagagtttgtaaattggtttgctacccttttgcatataaatgtaattttgttccccttatttacttaaagacattgaacttttaaaactttatctcataatagtgttttattttgattattttaaatttgctactgtaattactataattataaatcaggtattttcaaaatgacaagaataagcaatttctgagaattttggatatgcttttttctgttgtttaagatggagctctcctggtagcagtttgtcgtggtaaagtgagtgagggtctggatttctcagatgacaatgcccgtgctgtcataacaataggaattccttttccaaatgtgaaagatctacaggtaggccatcaaaaccttaagttttattattacaggagtcattggttttgtataaagttaattgcagggatccctcattttattgcgctttgcttttatagtgcttttttacaaattgaaggtttatggtaaccctgcattgtgcaagtctttcagcaccatttttccaacagcatgtggtcacttgtttctgtttcacattttggttaattctcacgatatttcaaaccttttcattattattatactgttagggtaatctgtgataagtgatctttgatgttactattgtaattgttttggggtatctcatactgtacccacataagagagcaaacgtaattcataagtgatgtatgtattctaactgctccactgactacccttcccccatttctctctccttgggactctccattccctgagacacaacaatactgaaattaggccagttaataaccctacaatggccccagagtgttcaagtgaaaggaagtgttgcatgcttcctactttaaatcaaaggcgagacatgattaagcttagtgagcaaggcatattgaaagctgagacaagacaaaagctaggcctcttgcaccaaccaattagccatattgtgaatgcaaaggaaaagttcttcaaaggaattaaaagtgttactccagtgaatgtacaaataataagcaaacagtcttattactgatatagagaaaggtttagtgtctggaaagaagatcaaactgtccgtaacattctcttaagccaaaacttaattcagagcaaggccctaactctcttcaattctgtgaaagctgagagaggtgaggaggctgcagaaaagtttgaagctagcagaggttgtttcatgaggtttaaggaaagaagctatctccataacttaaaagtgcaagttaatgcagcaggtgctgatggagaagctacagcaagttatccagaagatctggccaagataattgatgaaggtggctacgcaaaacaacagattttcagtgtagaagaatcagccttctattgaaagaagatgccacctaggacattcatagctagagaggagaagtcaatgcctgacctcaaagcttcagagaacaggctgactctcttgtgatgggccagtgcagctggtgactttaagttgaagccaatgctcatttaacattttaaaaatcctagagcctttaagaattatactaaatctactctgcctgtgctgtatagatggaacaacaaagcctgcacgacagcacatctgtttacagcatggtttactgaatattttaagtccattattgagatctactcctcagaaaaatcagttcctttcaaaatattactgctcattaaccacacatgtggtcactcaagaactctatggagatgtacaaggagattaatgttgttttcatgcttgctaacaaaacatccattctgcakccaatgaataaaggagtaatttctacttccaagtctcattacttaagaagtacatttcacraggctataactgctatagatagcgagtcctctgatgcatctggacacagtcgattaaaaaccttctggaaaggattcaccgttctagatgccattaagaacattcatgattcatgggaggaggtcagaatatcaacacttacaggagtttggaagtcattgattccatccctcattggatgactctgagggagttaagagttcagtggaggaagtaactgtagctgtggtggaaataataagagaactaaattagaagtggagcttaagacgtgactaaattgctgcaatctcatgaggacacttgaacagatgaggagttgcattttatggatgagcaaagaaagtggtttcttgagataggaactattcttagtaaagatgctgtgaacattgttgaaatgacaacaaaggagttagaatattaaataaacttagtgcatgaagcagcggcagagtttgagaggcttgaccccaattttgaaagaagttttatgttgggtaaaatgctatcaaagagcatcttatgccacagagaaatctattgtgaaaggaagagtcacatgatagagcaaacttcatggtcgtcttattttaagaaattgccacagccactccaacgttagcaaccaccaccctgatcagtcagcagtcatcattgaggcaagaccctctaccagcaaagagagtgactcactgaaggctcagatgatcattcaccttttttagcaataaaatattttcaagttaaggtatatacattggcttttgagacataatgctgttgcccacttaatagactgcagtatagtgtaaacatagcttttatatgtgttgggaaaccaaaaaattcatgtgacttactttgttatgatattctccttattggggtggtctggaaccaaacttgcaatgtctctcagggatgcctgtatatgttttcctgtatccttagacatttttaaatctttggtgaatctgaatgagtgagaaaaatttagtagatacagattttattttattttcaacttatactgtctttggtcaacaggagttattttcaaagtctggtcctgggccaggtgcattcgtatcacctgggaacttaatagaaataaagactttcaggctcatccagacctgccaaatcagaaactgtggaagtgaagcccagcaatttgtgttttatcagtcttttaaccacagactcatgggttcctccggggaatcctggggtcttttgtccatctggctcgcttctttccagtgtcctgccttgcagatcttgtgatttagtcactccatattctgatctcttccacctcagctcaacaggaccactgcgctctgcttgtactttaatgctctgtgctgtggtcaggaaattatacccaagcagagaactgggataatggagttcacctaatgaattccacttagctccagaattactgtcttgtgctgtttggtgtctactacctgaaaacaattgctccattttgcccggttatgcgattacttacaatggaagaaatattcttaaaccagttactcaatcttggccagaaacagttgtatctcattatcactgactgtttcctaaacaatatatttgaaaaactatagtaataatttgagcctaagttgaacttattgttcatcaaggaggattttcttttacttcctacaggcatttgaaagtgctggcaatctgagaaaatttgagattttctgaccactgagctgacttattgattatgacctatatccctccccctasgatacagtcagttagggtctcataccaaagcaggagttctttcattagaatagttatctttttaattgttaatactttactaggtactgtgaattagataatttttcttttatttttctagtccrtagcagtctttaggtaacattaacagtaataagcagtatttcttttggtagcccttactcttccgtaacctctggacctcttcaaaatttctgaaagtcctcagggggtatctcacttgatgattcagagtctaatactttttcagcctccagtaactttggtggtttctactacctttctccagttaaccagtgctactgctgagggcactaatggctatgcccaaagctgggtctcctattctaaaatggctgatgctgccttgactacagctactgatgaaacagttgacatctacccaagaaatctactgtcaccatcaacagcattggtgctgcattccactgaagtagagtgctactgatggcactgctgttggtactggtattgtctccttttaatgtcttatcattttactctagctctacattattgcactaaggctgctttgttaaagtggaaagaatccttttcccttctttagaccacatcttcttccaatatcttaataaaatacaattttgttccctaaaactaattatttccatttttgcctatgtcctctctcttccttggaccctacatatgagttcttgagacctggaaaagaagaaaaactttatggctaatactaggttgtactaaatattatacgtacaaagtaacaaggcctaaaaggatcatcaagattataattctgattacatatgaggagaagagaagggaatgatattcagagtagttatcaaaagaattttaactttttccataatttttagtaaaggaaaataagctgcaagaaaatatgagaatgcaggtatttattatgttattcttcattattttccaaaaattcttaaaattaaaaatatacatttgtgagaaaattccatttctcttttctccacctttgcctcaacagctatgattttgaacattgttattataccaatctggggttcttaatgctttttttcctcaggataaattcttcctagacaatatctcagtctgtcatgcaaaaaagacacctgatggcctactctgacattcctcagtcatgatcctatttgtcatagttctgcttatgtgcataaaacagcaaaataacagaagcatcaatgggttctgggtagaggggaggaaggtggttctaaagggttatccctagtggttcccaaaaggtacaagtagagtggacacaagaatagttcaagctgcagggacaagggatagaaaaagtgaaattatttaccagcactactagatgtactgggaagtgtatttcttattgccatatgtctggatcagttcttcttctgtaacaactccaaaacttagtgacttaaaacagcaatcatttattacaggtcatacatctctggagtgattgggtgacagatgatctaggcttgggcttggttggttggctctctcgattttagctgggctcagctactctgccctagttggctgatctgtgttgaagtcaactgagtcagctctgttccacctgtatttcattctttgtggaccaacagactagccaaggcatgttattattgcaatggcagtagtacaagagggcaggcttaactgtaagcagttaagtcaaatacctatttacatcacatctgctaacctcctgttgcccaaaacacgtccatgcacaatctcaaagtcaaggaaggggagaaaagggataatttctaccgcacatggcaaaggacttagaatcatgacttcaaaaagaagtcctcaactatcgcattttttcataattaaaaggtatttgttagttatccatttataagactggtgtgttacaagctttaagagtatacgcatgcagtttttataatgattaagaaggctttttattatttggaaatgcccagaatatagcagtcaatacctaaaatacttgaaatatgtcagagcatcattatgggtgatttcttaacatttttataaatggttaaacaagtatttgaaaatatttgtatgcctctatggaatataaaagttaagtttaaaattctaatgcagtccagtttatctgttttttttgtttgtttgttgcctgtgctttggtgtcatatttaggaaaatactggcaaatccaacatcatgcatatttgcccctaatgttttccttgaagagttttatagttgtaactctttaatttagatatttgattcctcttgagtaaatttttctatgtgatatatggtgaggtccaatttccttatatctaagtgaatcttttatttacagcgtatagttggatcaggtttttaaaaatccatttggccaatctctgcctttcaattggagagtttaaaccatttacatttaaagtaattactgataggaaaggacttacttttgctatgtagctatttgttttcttgtgtcatgtgctttttgttcctcaatccttcatcatttccttttttgtatttagttgatttgtagtatactattttgattcccttctttccttttatatgtattttttggtttttagtatttaccttggggattataactatcatctgaatctctgttcctccctttttatattgttattgtcacagattccatctttatactttgtgtggctgttagtttttaattattgtttttatgcatttgccttttaaataatacagggaaaacagaggaattgcaattcaaaagcatattgtagtattcacctgcagttacctttaccagtgtcctttattatttcctaaagcacatatttagtgtttataaagatgttttataatctgtttcatggtgtaccttgaggatagggataatttcttcagcatctttgtgtctctacaactaagatattacctaaaaacacagtgtttaataaatgttttagttaatgattgaatggggttttagtagaagttgttaaaattgtatttgactttgttatttgtttttaaaaacaacagcaaccactctccattcctggagactttaaggatggaaatgatagtaatcattagataataatgaacaggatggtagtaaacagtgatatgactcataaggaggcaatacagggtagttatagtagtaaatcattagaggatatgtagaagggaatgctcaatcctcaacagcatcttacactttatttaatacatagtagaacataataagtggagggagtatcttatattgactatattagctatccctcttttattatttatttatttaaatatttttattttattttatagacaaggtcttgttctgtcgcccaggttggagtgcagtggcacaatcatagctcactgcagccttgagctcatgggctcaattgatcctcctgcctcagtctcctgggtagctaggactgtaggcatgtgccaccacacctggctaaacttttttttttttttggagaggcgaggtcttgctatgttgtacaagctggccttgaactcctggccttaagggatgctcagacctcagcctcccaaagtgctgggattataggtgtgagccatcatgcccagcctgtattagttttttattgctgtgtaacaaattatcacatagtggcttaacacacatttattatctcagtttccattggtcacaagtgtgggcatggcttagctgggtcagggttccacaaaactgctgcaatcagagtgttggccaggttgtgttgttatctggcacttggggtccgtttgtggttgtaggactgaggttcttcctaatccatccaagaggcagtcttttttaaatttttttgaaaacagggtctcactccattgcccaggctagagtgcagtggtgcggtcatgggtcactgcagccttggcctctcgggctcaggtgatcctcccacctcagcctcctgggtagctggcactacagccacacgccaccacacccagctaatttttaaacgtggtttttttttttttgtagaggcaggatcttgctatgttgcccaggctggtctcgaactcctgagctcaagtaatccacccgcgtcagcctcccaaagtgctgggattacaagtgtgagccaccgtgcctagccctaaggtgtactcttggcttcaagaagctattcacagtttcttgccatgtggccttttcacaagccccctcgtatcatgacagtatacttccagaggccaataggaagctctctagcccyagtcagccaatacagagtcttacacaacttaataaaattgtgaggaaaaaaataaaattaaaaaatcatgggaataacttcccatcatttttgctatataatataacctaattaagagtgactatcccagaaccctttccatattctgttggctagaagcaaatcactggttctgccctcacttaaggggagagcattacaaagttgtgactctctgtatatcaccttagggtgtgtctgccatactcctattccctatgaaaagagatgatgatctaaatgacctacatagatggctcttccaaaactaaaactatgcttcaaattataggaccttaaattagaactttatagttttcttttacattaatagtctaataagtagaagttatttagtaaataaaaatttaaatgttctaccttatagaaacgaaacaacctatttctgcattattttgtctatttcatttgacttcatatttaaaaaggttaagatcattgagtcagaaaagtgatttgagtgggaaaaagaaggcagtgacattaattttatgatactaaaattttttcttaaatttgagaaagattatggaagtaaaagttaaaatacagtttaaaatactaacataagactttgcagtctcaatagcagggtttggctttttgagaagaaggaaaatgtatgttagagccaaaaatatgactcctttggctgtgaccaggatttcctcttcccaccttagggactagaaagtagaggtaggaaaatttcattttggagccaagtgtgacttgtttagttcaagtcataatttattgcacatacctgagggacctgaaaataaagaaacccactatgaaatgttgataatgggctactctgaaggtaagcattaagctaactttcccagtgaggatttttttcacttccacctttcccagatgcttctgatcattcataaggatatacttaatcgtataatagttaaaaagaaaactttctgtgcactaaaccaaagcatttgaggggcatgagaatgaaccaaggcttttatatgactagatgtcgatggaaaagtataactaaaataaaagttgttttctttttcatgtaattaaatcacagtataacaaggctgcctttttaatggatatctaaagcaaatcctctggccaattactgtgatctaacaaccacaggagtattcagctttataattgaggcatccacctctccaattggtgacatggacatagtttgtgagatatgataaggtacaaatatatttaggttttaaaattgcattttatttgtattgcctagcatagtatagtataatagtatatagaaaagttctccttcgtaggtattgttcctttacttctctgaagaaaaatgtataaaaccatggcatatggctaaaaatgtttatatttttaaaatgttgaagtggtgtgtttagatttttataattggtttaataaaatttgatggtacttttcattgtcagaagtgcccttcaatgattaaaataatttatcatgctaataaattttatatttgtgggtttttttggtaatatagtatgttgagttaccaaactagattttatttggaaactatttaaaattcgcatagtgatctgaattgtctatcttactattagcatacaataaccattatgagttcctttttttgtttaggaaacttatcttagctctcaatgtaccaaactatttgggtatatattattttaatcaattttttaaaattacatttatgattgaaaaattcagacatctattttagttatattagttacttatcgactttataacaaacacacacaaaaaaattgataggcttccatgcattgttggcattttataaaccacagaaaaagggtgctttccctaaaggataacagcattaataaagtaataaagcacattaaaccatgttaaaccagtgctttcaactgtcaaaatattatcagatgatggtagtattggaattaaaaaaaaattttttttgagacagagtctcactatattgcccaggctggtcctgggctcaagtgatgatcctcctgcctcagctcccgagcagctgggattacagactcgcgccaattgcacctggctgtattagaattcttaaatctaacagatttctttttaaggagaatgatattgttccattgttattccttttgctttgacggcaatatgaatattcacgagaaaatgaatgagggcaggaatgcaaaggactgtagtatatcaagaggaacttgacttcagaaaccttttagatagattcatctgttccttttgaatagatttataaatcccttttgaattactcttctatcaaaactatgttaatgacggccgtgtgcagtggcttatgcctgttatcccagcactttgggagcccaaggtgggcagatcatttgaggtcaggagttcgagaccagcctggccaacatggtgaaacccagtctctactaaaaacacaaaaaattagccccggtgtgatggcacacgtctgtaattccagctacttgggagtctgaggcaggagaatcacttgtacctaaggggcaaaggttgcagtgagctgaaattgcgccactgcactccagtctgggcgacagagcaagacactgtctcaaaaaaaaaaaaatgttaatgatattgaatgttttgtcatgcacttattcattcatttaacaaactttttttaagagcttaatttgtacaaaatgcagtaggtgtaaaaatgaacaagatgctgtctctacactagtaatgtcaataatttatggaagaacaggaacatataacaagatgctttggtggaatagaaaccaggtgctcagatgcttaggaaagctgaagttgaccaacacctttcgcctcccttgcagataccaatttactttgactaacttgcctaaaagggatggaggagccagagagatgagatttgaatcttctctacagtgagattcaaatatacaaacatttcataaagtggaatggcctcatcagaggttagattacaacaaaactattcagattataaaactattcagaataggccrggtgcagtggctcacacctgtaattccatcacttggaggccgaggtgggtggatcacttgaggtcaggagttggagaacaacctggccaacataatgaaactctctctctctactaaaaatacacaaattagctgggtgtgatggcacaatcccagctatttgggaggctgagacactagacactagagttgcttgaacttgggagggggaggttgcagtgagccgagattgctccactgcactccagcctgggtgacagagactctgtctcaaaaaaaaaaaaaaaaaaaaargaaagaaagaaagaaagaaaagaaaaaaagcaactattcagaataataaagcaacctttttttttttttaatatctggctagagcaccaagtattrtaatagactcaggggacagagtgatacacaacacagtttatagccccttgtctcatgttgcttatagtctagcaaggaatattgacattaatgtaatgaagaaacaatcacagttgtgataaaggctataagaaaaagtcacaggaaccctgggaatgttatagcaggtctttggggatcaagaaaggcttcctgaggaagtgatatttaacctgacactggaaagaaaactaggagttatgaatgtgtacagaatggataagagtattctcaacagagagaacagcatgtgttaaggttctaaggttgaaagaggatagcagtttccaagaactgaaagaagctgaagttgtgagtctgagagaatggcatgtgaatagaagctgggagaggtatttaggagccaaatcacttaggactctgtatgccattttcaggatttgggacattctaagttatgggaaaccagatccaggaatacagcctgaggtcagagtggagtggacttctggttatagtgttgcatctgatacagagacccacctggatatagctctgataataatacatggttacccaggggaaatggatgtgaatataaacttaaagtgctgtaatacttaactctttaacatttacaagttcagcaacttgctcttggaatttttggaaatacttaggttccatcacagatatagaagaaaaaaccttgtcacctctaaaagtctagagtgagtatatcctcaattacttaaaccttttttttcctcctcagagtatttttttccccagcttttttttttttttaagatagtttggccaaaagtattttgaaagcagtttctaagtatatcttgaaattccaaaattaaaacctagtttaaatctaagtaagctgtctaggttaataaattgtatatttaccttggccagcaaaaaatgagttaatgaaacccctctgtttccatcccttctgaaaaacaaatgaacaaacaaaaaaacacaaaacaaatggatgaattgctgaggttaatttttaaattctccatatttttaaaagatattttgggatcaaggatggaaatatttaaaatcccaaaattttaagcaagttcggttgataacctttttctcctaatactcatgtcattgtatttccttagcaaaaaataaataaataaatacataaagccatgcctgaaaatattgctggaagtttctctggataattaataaataaaaacttttggttttgatttttgaacaattctgaagttattttcttgtgttcatcttatttttggtgagaaaaggaactttgacctttatatattaattttgctctcaaactaggttggaggatttaaaagtgaaattatcaccctgaggacttgtaaggttgattgacacttacctacttatgttggcatggagcataatcagcagctctaccttaagggcagtggtgggattgttttttagcttctctgaaaataactaatttttttcttttgaggagaattttagttgtgaattttaatcagtttattcagtcaaattctctcaatgcctacagattgtagacatgtagaggggcttcaggtgactatgtcacttttttttctaactgtaaagctttaaggtctcaaataacataaactgtagtagatattgctgttccatgtttacaacatcactctttcctgtttttccctaggattaaaggcttgaaagcttgggaatgagttcagtttatactttgtaactgtaggacacatcaccccagtgcgtcagtgactatagtaagctatacaaataactcagtgtattttcctactgcatcaagtataccagatttgtgacttgaaattactttcaagctgtgtttctcaaacttggcactattgacattttggactgggtaattctttgttccgaggagtgtcctgtgcattccaggatgtttaacagcatctctagcatttacccactagatgccggtagtgggatctagacaccccccacggtcaccctgccaccagttgtgataacccaaaatatctctagacattgccattatcttctggttggcaaaattgctctcggttgagcaccactgttttacatagtgaggcatacaaatgtatacaataaattaaaattaataatctgcatttgtttttaaattatgatttatcaagttgaaaaacgtccaataaagcacttaccaagagtctaatatacactaaatacagtagatagctttttcttataacagtcttttggcctgcaccccacttctagcccctgcttctgacaggcagtgactttcacttctttagctattttatctggtatttacctccatattttatctttatttaatcagttttagacatgaactattaaattcctatttgagacaggattttacctcacttactctgctttttccttcttatagcctcccaagatagttacattacaatttttaattaaatctatagttattatgtacattatcatgactatgaaaatactgttcactgtaatcaaatgatttcctttcttttttgtttgtttgtttgttttgttttgttttgtttttgagacggagtttgcttttgtttcccaggctggagtgcaatggcgtgatcttggctcaccacaacctccacctcccaggctcaagcgatcctcctgcctcagcctcccgagtagctgggattacaggcatgcrccaccacgcccagctaatttgtatttttagtagagatggggtgtctctatgttggtcaggctggtctcgaactcccgacctcagaagatccgcccgcctcagcctcccaaagtgctggggttacagccgcccgtcctcctttctgttttgaactttagggttgatagaaccctcctctcttccacttcctttttctctttttaaaagatctttatctaaataaatgtgtcaccttccaatagttgtgtgccatgcctctcaatacagtttttctatcagacctgtcagataacaggccagttccttttttctcctggagatatcatttctggagcctcctgatcttctacttcggtcagggctaaattgctcatcaagcccagataactgccaatatcctgctatcatccaataactgctatcatcctaggaatttgatttgtctgtcttctgtgatggattgccagtttcctgggtctcagatcttcctcttgtttcttgcttactgtttcatctttgcggtacacatcctcccaacagtttccttatacctccatttcctgagactttctgaactcctgcaggtcaaactggcttatgtcccagcagtagctctgtggatacgttggtttgaactttctcttttctgcttagtcatttaacatttgtccatctaccttttatgttcatatattggggcttggaatcagatgtctcttagctttactgaagttggagactgtgtttctgtttcctatttgtcttttaatttaaaggcagtttctctgacaggtgagggaaaaagaaatgtctgggkttttttttttttttttgacttattgaaatcagaagtctgcattactttctaagataaagcatgagttatcaaagtgctatgattccatatgtcttattccaaaactcacattcacatttgaaaagctctgaatcaaatattcttggcaataatatttcaaaggtagaaagtgatcatatattttaaaaatcaaacctttgtggccaggcgcggtggctcacgcctgtaatcccagcactttcagaggctgaggcgggtggatcacttgaggtcaggagtttgagaccagcctgaccaacatggcgaaaccccgtgtctactaaaaatacaaaaattagccgggcgtcatagcacacacctgtaatcccagctactgtggaggctgaggcacaagaattgcttgaactgagggagcagaggttgcagtggccaagatcatgccactgtactctagcctggacaacacagcaagactgtgtctcaaaaaaaaaaaaaatcaaacctttgctcatgtttgaaagattatatatatatatagagagagagagagagagagagagacagacagacagacagacagagtctctgttgcccacaatgaaatgcagtggtgagatcatggctcactgcagcctcaaactcctgggctcaaatgatcctcctgccttagcctcctaagtagctgggactacagactcctaccaccatgcccagctaatttttattttgtagagacagggtcttgctatgttgccctggctggtcctaaactcctggcctcaagtgatcctcctgcctcatcctcccaaagtgctgggattataaacgtgagccaccacacctggccctgaaatataatttggatgtaataataaaaatctagatagcaaaagtgttatacttcatcttttggactgtggtggtaataaagttttaagtgtattttcagcattttccagtactcatttaatcttttttcttatgtacatgctcgctcttgcttaggtttgtttttagatgttagggtttaatcatatgaaagctgagtctgagcctcctctcactgggattaacttttactttttatgctactattgccaggaacctttatataattccctgagtgccattatgcgtcatattacatcttctggcatccaaaagcctcttccatgagcaatcttgcctttttccagtgttatataaggtagamgtaggtctctgtcacctgctgaatgcaccattactgagtccccttattaaatcctcttaatattgactcattcctttaagaacctctgattctatttactgctttcttacataagataatattttattttgttagttgttattgctagcaaaagtttattcacagttatygggctctcatatgtgactttaacaagaaaaactctagattgtaagatatttgaataaaataatatttagactaatatggtaccaatcatgcactcattctcatagattacaccactagcatattttatatagttatgctttcaaaaacacttcataagttgaaaagtgaccaaaaagtattatggaggatattaaagagtgctaatgttagctaaaatttcttagaaaatttaagatcaattgtagaagttattttttaaaatatttgtttcaaaactgtttgaacactgttctgtatgtattctgccaatgtatatattttcattgacacttgatgaaaaagtagccactccaagaacccaagaaacttactttttaagtcacctaaagttatgtgccaaacattgaataatgtagtcagagctctttcagaaggaatcggtccaggtggtaaaatgatttggggtgaactgactaaggtaatgactatatggcctccacagccttatggcttatttcacataccatgcagcaatatattacgacagcatttaaagtccactgaaacctacactgggtttcagaaatatggggtaagtaatgactttctcgtccacttacctctagtatctgatgctttactgtttcatgcatattgtcatttatttcttcaaccaattctctaaggtaaggttggcacacagtctccaacttcaataaagctaagagacttctaattctaagccccttcttacagacgaagaaattgagaaaggaaattataaagggctactgtgacttgtccaaggtcaaacaacctaagtctcaaggccttgattccaagccgtgtgctttttctttttttccattataccttcttcctcaaaataaactataacacgaatggtggcatgttctagagatgataatttaaacatttgcaggtttgtttgagtaatattttaacatggataacctacctaaattgacacaaaggtcattactcttaaaaagaattttttaggccaggcatggtggataacaccttaatcccacagctttgggaggccaagacaggaggattgtttgaggccaggagttcaagaccagcctgggcaatgtagtgagactgcgtctctaaaataatttttttttttaattagcctggtgttggggcacgtatctgtaagtcctagctactgaggaggctgaagcagaatgattgcttgaacccaggagttggaggttgcagtgacctatgaccatgccactgcactccattctgggtgacagagcaagaccttgtctctaaaaaataaaaatgaaaactttaacttagccctttacagaataagcatgctaagatttcttgcatgtcttagagtattaactttttaataggaaaaactggttatatttttataaccagttgaggctgaatatgttgagaagaggagatacctgatttcagagggatatattttgttctatttcttaaatttgaaatatccaggttattttagtcaacactgacaattagcgatactaagtttaatatagatttctctaccaaaaaaagcaccttatccaaaacagtcttaaagcatatgtgaaatatattgctgttactatgtcttgatagattattgtggtcaagttgtaacgtaacagggaaagtaagtaacaactaaaaaccatttctaatgtgcttttatcattattattcttatttaaaagggagcctggcttcttaactcttggcagaaactaactcattttccccatttaaaaaaagtgtatatatacacacacacacacacacacactatttggttaactgtgtcagaaatcttgaaaatatgccagatgaaataaaaccagctatattctttttaatctagctaaattatatcacatacaagatcttatgctgagtttataattctaaccattggaatttatattgtgataccctgatagaagtgtttacactatgatgatacggagcagcaaatgtctctaatgcacagtctctgtcttccagatttggtttgctgtaaatgtttaggctttaggccctgcaccttggctaaagataaaactgttctactcaagtgtttgctagacaaatgtgtttatttttctgaagcagagttttcttaatatttttataattatgtagtttagctgattatttgtccttagtctcatttggaggcttgaacttttgtcttcaagcttacatacaagaaaaaaattatattcttctattgattgctttcaggaaggcatttattactgaaatcataatatgtattggtatgagttgggataaaatccaccatctttcatgtgaagcagcagtaaaatgaagagatgcatttatagttctagctcatatttatcacaccatttattttttcagaagctactgataaactttaaaaaggctacttttgtgcaaagagtttgactgaaagttgaaaaagtctaatgttaataattgtgaccttaatttctcgttgacatatgcagtataatccttttgattatttcatattgtctattgctgctataagtgctctgctacttatactgtttccaataaaaccaaggcatggagaacttaagaaactttctgttcaatctcaagtacattatgatataatggtaaaaatcagaatccaaaatcatataacttctgcttgaatgccatctgtctattgggtatttttacccaattctaaaccgcctcagtcttaattatcaatgcctttgatattgaggatcttatttctacttatgtcagttaggttagattttgatgcagatatatatttatttgtctaaaaactatcatagtaagggwgctttacatttggtacaaacttgaccttcaattatgaaatgataaatttttgtgaatctatgcagcatctgaaccaatgggttgcaaactcaagcagctacatgaattaaacaggttatttaaatgagtgggttagttgaggacagtggtgagatagccaaagttttagatggtagcaaataaattttaattattttaagccacagtaagggccacacaaaacacaactatgggccttcagtttgcaactgttaataaaatagtttgtctttttcctgctcttcacacccctccaaaattacacatacactaatttattggggatgggaagcaagtagtttaactgtttccaaaaagtacaattaagtatagctttctattttgggaaaggcttgtaaaatgtatttgaaaagtaatgttaactgatctaaaagatcatcttcccaaaccacacttgagctcagtttatggtgcttactttctgtcaaaacttagaaaaaacattcacagttaacttccataatgtaaaatgtctgtctcattaggcattaaggaagcattggtcaacaggtataatgttgttagattataaggtaatgtgaatgtgggcatgrcctcccaaatagatcaaagactaatctctttgacagttasaagatggcagagcttgccttgggccttttgctggtggtgcacattgaaactatttgtttggaaagcatgcctgagagataagaatgtgtttataaggatgagcaggtaaaagtaaaaggttgtcttttgacatttcaactaatcccttccagcctttggtttacttaacatttaggctatttgctggcaggagaaactggctttttcacatatgctgtatgtcattttaaattggtcattgattttcatgcttgataatccctaagtgtacaatgaaatagattctgatgtcattaaaatgaggtgtactcactttccaccttttcttaacccttagttttgctttttccaattaactgtgatctcacaaagtaatttttattattgattaattttaaaaatctgtttatgtaataagaactatttcaaagttaacctttatatacagttcatttcagggttttgttttttgtttgggagttttttgttcttttgtaggtttttaaactttttatctaaaataaattcccctgggtaaaatattggcagtattttaaaggccatttggagtgtaaaaggtgtttgaaaatttgcaataaattaaaacaatgtagccatacagaaaattttaattatgttaatgaaaaatagaagaccaaggagtcataattttatttaatctaatagttgctacattcactctaaatattccatttataactaatacgtcctagagcaactgttgtcttcggaacagtgaccactataatgtatcagtctgtccatggtgtaggaaattttgaaaacacataagctattatgtctgacaaagtagatgtcaactttctttgaggaaaatattgttaaagaagagaagctgctttagttacatttttgagagataggtaggaaatacatatatttttcccagctggacagaattttaaaagtactttttcttatagtcttaattatcatgtgctttattgctgaatttccagggagggtattaacatatcatctaatatttactatggtgttatgttatcatttactacttatgttgccctaaaaagcaaagttgggctgggggcagtggctccatgcctgtaatctcagccctttgggaagccgaggcrgagggatcaccaggtctggagatcaagatcacctggctaacacagtgaaacccccctctctactaaaaatacaaaagaatagctgggcatggtggcatgcacctgtagtcccagctactcaggaggctgaggcaggagaatcacttgaacccaagaggcagaagttgcagtgagccgagatcatgccaccgtactccagcctgggtgattgagcaagactccgtctcaaaaaaaaagaaaaaaaaaaaagcaaagttggctaggcgtggtggctcacacctgtaatcccagcactttgggaggttgaggtgggcagatcacctgagatcaggagttcgagaccagcctagccaacatggtgaaaccctgtttttactaaaaaacaaacaaacaaacaaaaaatatatatatacacaaaaaattagctgggcatggtggcgtgcacctgtaatcccagctacgtgggaggctgaagcaggagaatcacttcaacccaggaggtggaggttgcagtgagctgagatcgcaccactgcacttcatcctgggtgactgagcggtactctgtccaaaaaaaaaaaaaaaaaaaaaaaggcaaagtctatgtcctttatatgtcctttatattctagttgtaaagtttcattttagaaatttgacagattcttttgagggaatgtaaaataaaaagggkggggttttgggtttttagattttggccaggcacagtggctcacgcccgtaatcccagcactttgggaggccgaggcgggtggatcacgaggtcaagagatcgagaccatcctggtcaacatggtgaaaccttgtctctactaaaaatacaaaaaattagctgggcgtggtggcacacgcctgtagtctcagctactcgggaggctgaggcaggagaatctcttgaacttgggaggcagaggttgcagtgagccaagatcgcgccactgcactccggcctggtgacagagcaagactccgtgttaaaaaaaaaaaaaaaaaaaaagcttagattttatttttacagtaagataaaattttttgacctcccaatttgaaagctgcttttcagaagtgtactgttctgttttctttcctaaagcatgttcttttatttaaaaaggttaatagtggctgggcacagtggctcacgcctgtaatcccagcattttgggaggccaatgcaggtggatcacctgaggtcaggcgtttgagaccagcctgaccaacaatgtgaaatcccaactctactaaaaatacaaaaattagctaggcatggtggcggccgcctgtagtcccagctacttgggaggctgagaggagaactgcttgaacctgggaggcggaggttgcagtgagccaagatcatgtcactgcactccagcctgggcaatggagcgagactctgtctcaaaaaaaaaagaaaaagttaacagtgttatagagtacacggaaaatactttgttttttcttgagtaggtttacaatttagtaaagtattattaagtaaaatagaggtcacttgaacctaagcactgcaataccatgacactcgattagacctagacagctactaagtaactactaactgctggtgggtagtatgtacagcatggatatactggacaaagggatgattcacatctgagtgggatggagcaggatatagcatgagatgtcatcatgctactcagaacagtgggcaatttaaaacataaattatttctggaattttttatttaatatttttggaccacagttgaccgcagttaacttaaaccactgcagataagagggaactgctgtataagttttgttaatatatcttgaaagcctaaaatgtttccaagaagtttactctttattttattttttagttgacagataattattgtacatattcatagggtacatagtgatgttttgatacatatgatgtttattgattagatcagggtaattagcgtatctgtcatctcaaacatttatcatttctttgtgtatggaacatgtaatctcctccttctagttatttgaaatgatgtaatattgttaactatagtcatcctactgtggtataaaagattagaacttattccttctatctagctgtaactttatatcctttaacaaatctcagccagacgcagtggctcatgcctgtattcctagcactttgggaggtcaaggtgggaggttttcttgagcttatgagttggagaccatcataggcaacatagcaagaatccatctctataaaaattaaaaaagaaaaaaattggccaggcatggcagcacacacctgtagtccaacctacttgggaggctgaggtgggagaatcacttgagcccaggaggtcaaggctgaagtaagccatgatcgcaccactgccgtccagtctgggggacagactgaggccctgtctctcaaaaaaacaagacaaaaaacaaatatctccccatccctcccttccttctccccttcccatctgctagtatcctctgttctactttttatttttatgagattaacctttttttttttttccgagacagagtctcactctgtcacccaggctggagtgcagtggtgcgatcttggctcactgcaacctccgcctcctgggttcatgccattcttctgcctcagcctcccgagtagctgggactacaggcgcctgccaccacacctggctaatttttttgtatttttagtaaagacgggatttcaccgtgttagccaggatggtcttgatctcctgaccttgtgatccacccgcctcagcttcccaaagtgctgggattacaggcctgagccaccgtgcctggccgagattaacatttttaagcttccacatatgagcaagaacatgtggtgtttaactttatgttttttatttatttcacttaaggtagtgtcctcagttccatccatgttgccgtgaataacaggatttcattcatttttatgactgtttagtattccattgtgtatatataccacattttctttatccacttatctgttgttggatacctaggttgattccatatcttggttattgagaatagtgctgcaataaacatggggggggggcaatgtctcttcaatataatgatttccttcaagaaagtaactccacatatctttatttaggcttctactacaaaaatacacaattggccctctgtatttatgggttctgcatctgtggattcacctaagtgtgaatcaaaaatatttgaaaaaaaattgcttctgtactgaacatgtacagatttttttcttgtcattattccctaaacactacaatgtaacaactatttgcatagctttacatcatattagctattaaagtaatccagagattatttaaagtataaaggaggatatgcataggttatgcaaatactaagtcattttgtatcaagtacttgagcatccatggattttggtatctgagggaagttctgaaaccaatcacccatggataccaagggacaactgtaccatttgatatacttgtcctggaatactacaattgcaccagattattacctggagacaattactaggccacagttcagggagaataaactcaaacagagctcagtggtcacactgagttaaagagataaagtttagggaaagtccgtggcagctagaatttgcaaggtagagtactagagaggatggagctacatagagagaaagctccaggtatctgcataggcgtccccttaagtttttggtcaagtactgattggcatatacatgagaggaagctacataaggccagggaaatgagtaggcagaaaacttcctagtgcttacaaagtctgggaatagtttgagttcccagcagccagaagagaaaaacttcataacacatggggtacttgaaacaatcatcagtagagtttcacctttgtatgggggataaattagccctagactaaaggctgctcttgactttccctaacaaagctgccaaagaatgaactggttccaagtaccctaattgcattcacagcaaaatccagtaaccactgacttaatgcccacaatgtctagtatccaatcaaaaattagcaggcatgcaaagaagagaatttaacccataatacagaggaaaatcaatcaatagaaacaaaaccagaaatgacagagatgttagaactggctagcagacaaggatttttaaaatatcttatgttttatgctctgtaagttcaaagaagatagcagaaaacataagcatactgaaaagagaaacagaagctattttttaaatacctatgtgaaatctctctatatgaaacaaaaaatacactggatggattagacactgcagaaggaaaatttggtgaacttgaaatcttataaataaaaattatccaaaatgaagtgtagagtgaaaaaaaagagggtcagtgacatgtggagtaatataaagtagtctaatatagttgtaattggagtctaagaagaagagtttygaggcagaataatatatatatttagagaaataatggctgaaaatttttcaagtttgatagaaactataagcccacaggtccaagaagcttaataaaaacgcaagcaaaatacacacaacagcacactgtaatccaatccaaagtcgctaaaagaaaggggaacattacagagataggacaatagcatattttttcttcagaactatgcaaatcagaaaacaatgaaaagccgtctttaacaaaagaaaaaacctgtcaatttagaattcttgatcaagtgggacaatctcttaaaaatgaagatagtgaagtcttttcagaaaaagaaaagttgaaagaactcattgctagcaaacgtgcactactaatattaaagaaagttcttcaggtagaaggaaaatgataccagatggaaatttaaatctacrtgagaaaatgaagagtgccagaaatggtaaatctgtgggtaaatacggtatattttaaaagataatcttttgggacaaarcagaaatctgaataaaatacatagattatttaatactaatgtactaatgttaatttcttaatttgacatgagctatagtaatataagatgttaacattaggggaaattgggtaaagggtataaggaatctctgtactatctttggaacttttctgtaaatctaaacttatttcaaaattataaacttatttaaaattaaaagataatgtactgtttaaagcataatcaaaatgttttatgggtttatagcacgtataaaactaaaatgtatggcagcaatagcataaaggacaataaaaggaaatggaagtatattgtggtattgtttttacatcatatgtgaagtggtaaaatattattttaaggtagactaataaggatgtatatcataaaccctagaggagtcacacacacacaaagacatagctaataatccagtagtggaaataatatggaagcatattatttccagtagtggaaataatatggaagcatattatttccagtagtggaaataatatggaagcatattatttccagtagtggaaataatatggaagcatattatttccagtagtggaaataatatggaagcatattatttccagtagtggaaataatatggggggaggggggaacttgattgatccaaaagataaaaacaaaatggtacagattgggggggtaggggggaagcaaggtggtagtcttaaacccaatcataacaataactacattaaatgtaaatggtctaaacattgcaattaaaaagcagagattaccagactggataaacgtaaaagaatgaactactcataaacctttcaacatgaatgaattctaaaagtatattaaatgaaaaatgtcacaagtcattacatagtatatgataatatttatatgaaattctataaagggcaaaacagaaagcagatcagtggttgccagggccagcagtggaagaaagaaatttactataaagggataagagggaacttttgggggtgatgaaaatgttctatattatgatggtggttacattactatatatgtcaaaactcacctacttgtacactgaaaattgtgtggatttaatgaatgtaagttcaataaaactgcttgagatcacacagctgattagttatatgcattaggtaatttaaggaatgtgaagctaaataaaactattttaaatgaaacgaaaaaaatcagtactgaaaaacaaaataaaatctctaccctaaaaatatgtatattcaaactgttagaagttaatatgatgtttaaaatgagctttaattatctactaattttttaaatatattttaaaattattaggttgaactaaaacgacaatacaatgaccaccattcaaaattgagaggtcttctacctggccgtcagtggtatgaaattcaagcatacagggccttaaaccaggcccttggtaggtaagtggagtgaaatttaatataatattatctgtgacagggctatatatataaatctagtcttgctactttactctttrtaataaacttggtaaaattttatttaactggaaccataggaactggtatgtattcaatgatagctgtcacaagtagaatttgaaaagagtaagaagaataagttattcccaaaacaaaactcacaatttgctaaagtttaaagaaattttgtgattgatctaacaatgaatagcacacaaagatgctcagtaaatattaaagaaagcttatcaaatcaaaaaagttttgtcttgtgaacatcaaagctcagataacaattttatagataaacagacctctctcctcacctcccccaaaatgtcagggaagaaaattgatataccagccagtgtgaggagatattctatttgaaagtgtactttcagtacggaatctgtgtatctgttaaaatatcatcaaatagaaacaaaatctattttactgcccagtgagcttctgtagttgcacaatttttcattctgcttctatgtaaagaagacatctgacagaaaaaaaaatcattttcattttaatgttatttgtaagctttagataacaatgtgattacaatctatattttcttgtgccttttatgtatagtgataatgttgaaggataacattgaaactgaaggatatttaataattaaagaaaaaataaaataattaattattattattattattattgttttagacagcctcactgtgttgcccaggctggagtgcagtggcgtgatatcggctcactgcatcctccaccgcccaggttcaagcaattctcctgcctcagcctcctgagtagctgggattacaggcgtgcgccaccatgcccagctaatttttgtatttttagtagagatggggtttcactatgttggccaggctggtctggaactcctggcctcaagtgatccactcacgtcagcttcccaaagtgctgggattacagatgtgagctactcgggaggctgaggtaggaggatcgcttgagcctgggaggtgggggttgcagtgagccaaaatcatgccactgcattccagcctgggcaacagagccagaccatgtctcaaaaaaaaaaaaaaaaaaattagcaaatcattgaagaagggttaaaacaaactataatcgtgatcctaaagaattaacaccaactaaacatttaatcatgatactccgacttctaaatattcttgcccattaagatttgtgctttgtgagactcatttttaaatcattattttatacagtcatgcatcacttaataacggatatattctgagaagtgagttgttaggcaattgtattgttgtgggaacattataaaatgtacttacacaaatctagatagtatagtctactacacatataggctatatgatatagcctattgttcctagatcacaaacctatacagcatgttactgtactatagacaattgtaacacaaggataagtaattgagtatataagtgtagaaaaagtacagtaaagatatggtatagaaatacagtatattaaaaatggtacaaatgtatatggcacttaccacgaatagagcttacaggactataagttgctctgagtgagtcgatcaagtagtgagtgaatgtgaaggcctaggacattactgtacactaactgtaggctttataaacactgtacacttaggctatactaaatttatttatttttattttttcaataataaattaccctgagcttattctgactttttctttttgagagatgaggtatggctatgttgcccaggctggtctcgaacacctgggttcaagcagtcctctcaccttagcctcccaagtagctggaactccaggcacacgccactgtgcccagcttrctgtaacttttttactttataaactttttatctttttatctttttttttacctttttgactcttttacaacacttagcttaaaacacaaattatacagctgtayaaaaataatttttatatccttattctataagctttttctatttttgaaatttttattttttatttttttactttttaaacttttctgttaaaaatgaagacatggggagcgcaatagctgaagcctgtaatccagcactttgggaggccaaggtgggcagatcacttaaggtcaggagttygatagcaacctggccaacgtggtgaaaccccatctctactaaaactacaaaaattagytggatgtggtggcaggtgcctataatcccagctacttgggaggctggggcaggagaattacttgaacccgggaggtggaggctgcagtgagccgagatcaccccactgcactccagcctgggcgacagagcgagactccatctcaaaaaaaaaaaaaaatgaagacataaacactcatgtagtatcctaggcctacacaggatcaggagcattaatatccctgtcttctacctccatgtcttgaatcactggaaggtcttcaggaccaataaataacatgcatggagctgtcatctcctgtgataacaatgccttcttctggaattcttcctgagggatctgcctgaagctgttttatagttaactttttttttaatgtaagtgaaaggagtacactgtagtgataagaagtacagtatagtaaatacacaaaccagtaacacagttattatcattatcaagtattatataccatacataattgtatgtgctatacttttataagactagcagcacagtaggtttgtttacaccagcatcgccacaagcacttgtaatgcattgtgctataatgttacaatggtgacatcactaggtgataggaatttttcagctccattataatcttatgggaccactatcatatatgcacttcacactgactgaaacatcattatgtggtgcattactatcccttaatttcatattgtagggcatcaacatctaatttgtaaatgctataattaggttttgtgcaaattaaatttttttttttttttttgagatgaagtctcgctctgtagccaggctggagtgcagtggcacaatctcagctcactgcaacctctgcctcctgcgttcaagcaattctcctgcctcagcctcccaagtagctggcactacaggctcgcaccaccacgcctggctaatttttgtattcttagtagagatggggtttcaccatgttggccaggatggtctcgatttcttgaccttgtgatccgcctgccttggcctcccaaagtgctggaattacaggcgtgagccaccacattcggcccacaaattaatattttatattctctatgaaattttaattaacttcaccatgtaattatttatttcctagtgaagctgtaaggcatttggataattcatagaaacaggttgggccaggtgaggtggctcatgcctgtaatcccagccctttggtaggtggaggcgggtggatcacctgaggtcaggagtttgagatcagcctggtcaacgtggtgaaaccccgtctctactaaaaatacaaaaattagctgggcatggtggtgtgtgtctgtagtcccagctactggggaggctgaggcaggagaattgcttgaacctggtaggtggaggttgcgttgagctaagattgcgccactgcactccagcctgggcaacagagggagactccatctaaaaaaaagaaattggttaagagtaaaatcatgaaaacatgatcagttgacatatttgcacttcaaccagaagtcccacaactaatcataatcttaaccagtcaaataaaaaatttttatttttctggtgtcttgtgtatttacattagcccatttgtaaaccagatggcatgtgggttcagatttgtgtatcgcttagacatagctatatgtatatatatacaaatacataagctatgtgtatttgtgtatagcttagacataagactacaacaactagatttaagccctagaacatgtcacccactgtactccccatcattttattttttatttttgtttttattattattattattwttwttttgagagagtcttgctctgtttcccaggctggagagcagtggtgcgatctcagttcactgcaacctctacctcccaggttcaagcgattctcctacctcaacctcctgagtagctgggattacaggcacatgccaccacgcctggctaatttttgtatttttagtagagacgggtttcgctatgttggccaggctggtcttgaactcctggcctcaagtgatcctcctgcttcaggctcccaaagtgttaagattacaggcgtgagccaccacacccagccactccccatcattttagaatggtattctgcatgtgtttttcttcaaactgagygattcaggtctatggttaagctacagagatcctgctccccttttttccctagaaatcccattttacttggaatcaagttgcactgaaggttattgaagcatcacatctgcttactttgtgtctccctgctgattgacattttttttttgaattttaatattcagctaatagtttctaggggcgcttgaatatatttttgaaattgttgacttttagtcattatactcaatttgcggaaaataagtattcttagctcagttgatttttttcttccttttagtataagcaatgccttgaatttcaagaaaccatgtgaaacagaagtcatatttgtatgtggttttctcgtttacaaaccttctccacatatattatctcatttgattcttctaccaatcacttccagtagcaatgcatgttgctacttgatgttttatttgatttgctttgtttttgtttgtttgtttgggtttttttgggtttgttttttttttttttttgagatggagtctcgctctgtcgcccagtgcagtggtgcagtcttggctcactgcatcttcctccacccaagttcaagcgattctcctgcctcaacctcttgagtagctgagattacaggcacgcactaccatgcccagctaatttttatatttttagtagagacggggtttcaccatgatggacaggctggtctcaaactcctgacctcagatgatccacctgcctcagcctgaattgtttttaaactggttgtgagaaattaaattatttttctaaggccacatggctactaaatggccctttacatcttgttcccatccatttctaaaactgtaatacctgctttttcatccttatcctctacctctagccaccgaatttttcactattaaacataagtatgtcagtattaaactatcaaacatgctatattctttcattatgctttgccttggcttataagttatcatacaattcgtttggcaaatttagcaatcaaaacctcattgaaagtcatgtcctttatgaggacctttaaaacttctccaactagagttatttataccttagtaaacctatagcattttggttgctatctgtattatagcacatatctcattgtattgtaatagcctatctgttttcttccttgaacatgtgttacgttgttacattctcagcaaccaactaagtctcaaatgcttgttgaattagtgaaaaatgtgaggttcagtgctttttcctgccatacaacattgcccagagagcttttagagcttcaaaacatgctttcctggaatatcataaaaatcatgtatttatagtattgatatataatactgtacttttagaattttattaatttttttaaatggagagcccagctatcattttactgattttcagggaataatgtcaataattaataatttgttacaaaggaacttaccctttaaaaccaatcaataagtaaaattttttaaattaaaaaaataaagaccaagcaaatgttttatgttatttaataaaactcataatgtatattgattgacagaaaaggtgcttatactctgaggcactcttcttgtaagggatacagaagatctaaagtaagcagaaaccaatggattccttttaatgttaatttttttaagcacacatgggactgttagagtatttgaagtaatataagtctatgaaatacaagaacagcctttggaaacatacaagatggttttgcaaccaggttacaactgcactatgagttttctaactagtctttgttgctttactgaaagtataatctttgtctcaagccggcataattcatttaagcaaggcagtttgaaaacaatggtaaaaagaaaaggtgaaatcttttttctttgaattgtttcattaacagaaatacctttctaccataccatagaatgctttaaacataaatcaaactggaaccaaaatacagtggcacactgactttccattgactttcaatactcttctgtagtattgacaatattaatcttcttcctatccttcccagtgttatggtctgttgccttggagcctataggttactttaaaataatatcaaaaaataatgccctataaaatttagattttttttgtctttgtagaaaaattgaacatttatgttactcttcaccccctcaaaatcctatgataataaagaaatgaaaatgtcaaacctacaatattacaaagagagagaggagacagtgacagacaagcgatatcaacacattttgaacactggaaaacagccgaatgactgaatgacttagcaggcaagagaaagctgaaatttaaatctacattgatgatagtcaacaagmactttcagatttatgcatgaaaaagcctaggatttggagcaatctaaaatgtcaatgaaagtaaggtttaaaaacaggtggcttggttgcaaattagtataagaaacaattagcctcctccctcacccaggtttacttctggaaaggttgaacaacagagwctctgtattcttcaacaccaggcacagctgaggaygtattaaagatggaggttaatattatatacggggattttacatactgaatgtgagaactccaccccccttttcttttcagctctgagtaggctgacaatcagtcttacatctaccaagcgtgtagaattcctttttagggaaactgaccaccccatgagaaaatatctacaaattggcccagttcctgccaaattaccctatagcaaacttcccagcctataagctctacccatacattcagagctgccaatcagtgttttagtgccttactcttaagtaagtgcagagtcttcaccagattgtcaaagaaagtctgtaacatgaaaaacagaccaaaacaacaacaacaaaacaagtccaacaaagcaaacaaaaacacagcagaagaactctgagaaaatagaaacaacacaacagactagaacaaggattggccagtgttttctataaagggccagacagtacagtagtctctccttatccacagaagatagattccacaacctccactaaatgcctgaaaccatggatagtaccaaactctacgtatactatgttttttctatctgataaccaagatggctactaagtgactaatgggcaaaaagagtatacagcatggacatggtggacaaagggatgattaacatcctgagtgggacagcatgagatttttatcatgcaactcagaagggcatgcatttttaaatgtatgaattatttctggaattttccatttaatatttttggactacatttgaccgtgagtaactttgaccataggcaagattgtggctgtgggggactattgtgtatattttaggctttgcaggctacatacagtctctgtcacatattttttgttttttccttaatcctcttaaaaatgatcacttgaggtcagcagtttgagaccagcctggccaacatggtgaaaccccatctctactaaaaatacaaaaattagccaggtatggtggcgcacgcctgtaatcccagctactcaggaggctgaggcaggagaatcacttgaacctgggaggcggaggttgcagtgagccgagattgcaccactgcacttcagcctgggcgacagaatgagactccttctcaaaaaaaaaaaaaaatgtgaagaccattcctacacattggaggctgtacaaaaacaagacatgggctatttttgtaggcactataggctatagtttgccaacccccagataggagaaatcttcaaaaaaaaatcttaatatccatagagatgtaccatattgcctycatgaaacaagaacaaaagaataagaaaaagtgcttagaaattaacatgataccaacaatttttaaatgcataatagggcttggaagataaaatggaaattttccagatcaaaaagagaaagcgggaaagaagaactagaaaattagaggatcagtatgcaataaccaacttctgatacatagaaggctcagatcatgagaacagaaaaaataaaggaaagaaacatctcaaagaaataactcaagaaaatttctcagaattgagtaacacgatttcttggttgaaggggctcactcaggcacaggtaaaggaggaaaagctacaaagcacttcactgtgccctttccaagtaccggggataaagaaaaagtcttaaaatcttccaaagacaaaaagacaggtctctatcttacaaaagatagagaatcagaatcataacagacttctgaaaagcaacactgaaaccaaaaaaatagaagaaattgtcttcaaatattttagggaaatttttgatttgtaacttaagttctacatgagccaaactatcaataaactataagacaaaataaagccttcaacatacaaggacctaaaacatttgcttcaaatggacactttctcaggatgttactggaagatgtgctccatcaaaataaaaaaaaaaaatttaaaaaggaatatcaaggatgcagggaactagggttccaatccagaatagaggcaaagataattcctaaaacaaccaggaaggaaaactctggaatgataacagtgcagcaagtagtctaaattgagttcagaggatagaaggtttgaccatacttggaagaatttttacagctatggcatggtttggggattaattaatgacagaaaacattaaaaattaatccacaaaaagaagaggcagttattaactccagggaaggcaaaaagtcttgtacaataaaggaaatctaattatagtgcactatgtgactcagttgttaatattcccaggaagggatggtgaagtatcagtggtataagagaaataaacatcttccacaggagagaatcagtacgtaagttctaaagttcaaaaaccaagaagtagtagtaggatcaatgttccttagaaatatggagataaataaccagaagatctacctaaaatattgaaagtaattgtttctgaggaatgggaattgtaaacaggaggtgggtagggaaaggacagttatgtttttcattgaaaacataaaactatgtgttcgtgtttctttgataaaagttaaaatttacaaagctaaaattaactttaaaaaatagtttgggcgtttcagtcctagaaaagatgaagtaagcatatttagtagtctaaaaaacctagacagaatatrtggagtagctgtttgagaactctgaaaagtcaacactagcaggtagattaagaaaggagaccagaattcaaaataccaatgatctagctcaagtaactgtataataccagataaagtagaattccaagcaaacaaaattagggataaaagagaacattacataatgataaaagggtgaattcaccaagaagacataagaatcataaatgtgtatgcaccccaaaacagggtttcaaaatacatgaagcaaaaactgacagatctgaagagaaaaatagaaaaatacacaattatacttggaaacttcaaaattcctctcaataacagaactagtagacaaactaataaagatatagatgacttgagcaacattattagccaactcaagtccagtatgttctctgactgtaatggaattaaactagtaatctagtttaaactagaaatcaataacagaaaaatgtccaaatacttggaaattaagcagcatatttctaaataatccacaggcaaaacagcaagtttcaagtaaaattagaaaatattttgaactgatcaaaaatgaaaatacagcatatcaaaatgtaaggactgcagctaaagcagtgctcagatggatatttatgtcattaaatgcttattttaggaaaaaacatcctcaaatcattgatcttagtttctaccttatgaagctagaaaaagaagagctaaataaatgtgaggcaaacaggaaaaaaaggagtaataaaaacaagtataaattgatgaattgtaacaaaaataatgaaatcagtgaaatgaaaattaagctgcwtgaactaagagttgagctaccattcaactcagcaatcccattactggttatatgcccaaaggaaaataaatcattctgccaaaaagacacatgcagctgtgtgttcatcacagcacaattcacaaaagcaaaggcatagaagcaactcaaatacctatcaacggtggactagataaagaaaatgtggtacatatacaccgtggaatactgcacagccattaaaaaagaatgaaatcatgtccttgccgcaacatggatgcaactggaggccattatcctaagcaaactaacacagaaacagaaaaccaaataccatatgttcccacttataaatgggagataaacaatgggtacacatggacttaaagatgggaacatagacactagggaatgaatgtaagtggaggcagagaaggagggaagcaagggttgaaaaactacctattgtgttctatgcttgctttctgggtaacaggttcaattgtactccaaactcaacatcatgcaatatacctttgtaacaaacctgcacatgtactcctggaatctaaaataaaataaaagttgaaaaasagaaaaaaatagactctttgaaaagatcaataaaattgataaacctctagcaaaattaacaaagaaaaaaaagagaagccacagttactaatatcaggaataaaagaggtattaatagtataactacagactccacaggcattaaaagaataatatgagaatactacgaaaaactctatacatatacatttgwtaacttagatgaagtagattaattccacaaaacccacaaaataccaaaattcacccaagatgaaatagataacatgaatagctatctagcaaataaatagaattcatagttaaaagccttctaaaaaattctccacccagatgtgttcattaacaaatattaccaaacatttaaagaagaaataacataaattttacaagatctcttctaaaaaatagaagatgtaatccttctcaatttattttatgaggccaagatgaaacagataacatgcatagctatctagcaaagaaatagaattaatagttaaaagccttctaaaaaattcacccagctgtgttcactagcaaatattaccaaacatttaaagaagaaataacacaaattttacataatctcttctaaaaaacagaagatgcaatccttcccaatttattttatgagaccagaattaaccagcaaccaaaccagatgaagactacaaaaacaaaaggaaaagggggaaaaaagaaaactataagagcctaaaaataaaactgcacacctacaaccatctgatctttgacaaaattagcaaaaataaacaatggggaaaggactccttgttcaataaatggtgctggagtaactggcttgctgtatgcaaaagaatgaaactgcaccccctaccttttaccatatacaaaaatcaactcaagatggattaaaattaactcaagatggattaaagatttaagtgtaagacctcaaactataaaaatcctagaagaaaacctaggaaatactgttctaaacatcagatttggcaaagaatttgtgactaagtcctcaaaagcaattgcaacaaaacaaaaattgacaagtgggacctaactggctagccgtaagcagaagattgaaactggacccccttccttacactatatacaacaaccacctcagggtgaattaaagacttaaatgtaaaaccttaaactaaaaacccttgaagaaaacctaggaaatatcattctggacataggctctagcaaagatttcatcatgaagacaccaaaagcaattgcaacaaaaacaaaatcgacgaatgggacttaattaaacttaagagcttctgcacagcaaaagaaactatcagcagagtaaagacaaaccacagaatgcgagaaaatgtttgcaaactatgcatcttacaaacgtctaatatccagaatccataaggaacttaaattgacaagcaaaaaacaaccccattaaaaagtggccaaaggacatgaacagacatttctcaaaaggagacatgcatgtggccaagaagcatatgaaaaaatgttcaacacactatcattagagaaatgcaaatcaaaaccacaatgtggctgggcgtggtggctcacgcctataatctcagcactgggaggtcaaggcgggcaggtcacttgaggtcaggagttgaagaccactctgcccaacatggcaaaaccccatctctactaaaaatacaaaaattaggtgggtgttgtggcgcacacctgtaattccagctacttgggaggctaagcaggagaatcgtttgaacccgggaggtggagtttgcagtgagttgggattgtgccactgcacttcagcctgggcaatagagtgagactctgtctcaaaacaaacaaacaaacaaaaacaaaaaaacacatacatacacaatgagataacatctcgcactagtcagaatggctatcgttaaaaagtcaaaaaaaaaaaaaaaaagaacagatgctcgcaaggttacagagaaaaaggaccacatatgtactgctggtgggaatgtaaattagttcagccactgtggaaagcagtttgttgatttctgaaagaagttaaagcagaagtactgttcaacccaacaattccattattgggtgtatacccaaaggaatgtgagtcattctcccataaagacatatgtatctgtatgtttatcacagcactattcacagtagcaaagacgtggaatcaacctaaatgcctattgatagtagactggattaagaaaatgtggtacatatacacaatggaatactatgtaaccataaaaaagagtaagatcatgtcctttgcagcaacatggatggagctggaagccattattctaaatgaactaacggaggaacagaaaaccaaataccacatgttctcacttatacacgggagctaaacattgagtatatgtggacagagaagggaacaacagacaccagggcctacttgagggtggagagcttaaaattaagctgtttgaactaagagttgagctaccattcaaggaaaactacctgttggatactatgctgctttttacctgggtgacaaaataatcggtcctaatttgtcacaacaaatcaccatgacatgcaatctgcctctataacaaacctgcacatgtattcctgaaactaaaataaaagttaaaacaacaacaacaacaacaacaactatagatcaatatccctctgaaacatagatgaagatgtcctcaacagagtgccagcaaattgggtaaggtcctcaaaaatggcagaacaaagacctctgaaatttctaaaagcaatgagaaaataggcaaaaataagttagaagcaactttatcaaaactctgggtattaaccaaaagttacagcattctaggaagaatttactccttaaaaatagctgaattgcagtaagaacagtaagctttgtggtattttaacttgctctgttctcacctctctccaagttcacaatagccttaaaaaccaatagcctgaaatcgtgaggaaagccaacaacctgacagtcattggagggagcaaaacaggtctggagtacatttccagagaattatgtgacctacctgggagtttcctggaagaccccactcacaaggctatctttatttgacctgactcagagctcacccagccagctgtttaacttcacagttgcctgagacaatgaatgacatttggggcaagtgagaggctagccaaaaaatgtaaagagaaaagctgaggaatgcaatgtccatagagagcttttaaagttctgacatattcctgggattttagtgggccatgcatatgtgtaggagagtgcatgtgaccagtgatgtggacatgctaagaaaagacctgaaaaggccctaagctatcaccttggtgctctgctgaagcaggaagtgaaaacaagatcagagttattacctacagtgctgaggattgaaattatgccccaatatatgcagagactcttggcaaagaatgggagamatgatggttctagacatttaaggaaatctctgtctaattattagctgactactaagttaatcgagcagtcttcaatgaccacacatgacaatacagactttacaagattattttagaaaaattacaagaacaaaaaaccttgaagagggagaataatccgatttctatatttgccacattatattatttaaaatgtactgttttcaacaaaaatcatgacacataacaaagaaagtataactaagagaaaaaaataatagaaactctccctgaggaaacccagacatttgtcttagtagacaaagctatgccttaggagagaaagctagttcaaatacattcaataactaagcaaactgtgtcaaaaactgtgagaatgatgtctcacctcactaaatagggaatatcaataaagagataaaatttgcttaacaaaaacctaatggaaattctggagttggaaagtataatagctaaaatgaaatattcattacaggggcccaacagcagatttaagaaggcagaagaaagaattgatttacttaaacatcaattgagattatttactctgaagaacagaaagaaaaagaatgaagaacaactagcataatctcagagacctgtaaaacctcatcaagcgtaccaacatatgcatatttggagtcccagaaggagaggagagaaaaaagaatagaaagaatatttaaagaaattatggctgaaaacgttccgaatttgatgaaaaacgttaatttatacatccaagaagataagcgaactccaagtaggatgaactcagggagattcctatctagatggttgaaatcaaacagccagaagacagaatctagaaagcggcaagagagaaataactcatcatatacaaaacatcctccagaccaggaagcagttaattgacatgttcaaagtgctgaaagaaaatgactgtcaaccaagaatactatatctaacaaaactgtccttcagaaataaggtaaaaattaagacattcccaaataaacaaaaaccaagagaattactctgtagcaaacttgtcctacgagaaatactaaaaggagtctttcaggctgaaatgaaaggatattaggaagtaagtcagatgcacacgatgaaataaagaatacccacaaagttaacgacatacgtaaatgtaaaagttaatataaaggtacttcttgcttataattcttttactcttgattttttaaaagagcaactgcataaaacaataattgtaaatctgtggtgattgtcttgtgggttgccaagaccaccttcaggttcagcaattcacttggaacagttagatagcctcaggatataactgtatacatggctaggatttattacagtgaaacgacaccaagcacagtcagcaaagagaacaaaacatgtgcatgggacaaagtctagggagccagtcttaagcttccaagtgtcctctcccagtgcagttacacaggacacacttccccgagcaatgagttgtggcaacatgtgtcaaatatttccaatcagaggaactcattagcacccagggattttactggggctggtcatataggcagcctctgcctagcagtttccagaagactagactctcaaaaggagaatgagtattcagcattaatatattgtttactcaaacagttcaggcacagtgagacactcttatcagtcaatcacaggtaccctcctgaatctaagttttcattcatcagcccaggaacacctttaaacagacctttctaggggtaaacaatccaacctacaatgttaattcttctgcaccagcatacaatgtttaaagatataatttatatgacaataacaacccaaaggtgacagatgagggaacagaaggaccatttttttgtactattgaaattaagttggcaattttcctgactagtttattactggttgatatgtttattatactcttcaaccactaataaaaataagaaaatatagtaatgtaaatgacaagagaattaaaattatatactggaaagtgtctattggagaaaatggaaagtaatggaaagacagaagaacaaaatacgtaaggcatatagaaagcaaatagcaaagtgagtattttacaaaatagctgagtaaatcctaccttatcagtaattacattaaatgtaaatggattaaatactccaatctaaaggcaaagtttggctgaatggattgaaaacaatgtgatatatgctgtctgcaagagaaacactagtttaaaaaacacaaataggttgaaaataaaatgatgggaaaagacataccatgcaaatagtaaacaaaagagagctggtttggttatactaatatcagataaaatagacccttaagacaaaaaaaagttaatagaaacaattaacattttataatgataaaagtgccattctgcctgcaatcccagcactttgggaggctgaggtgggcagatcgcttgagcttaggagttcaagactagcctaggtaacatgatgaaaccctgtctctactaaaagtacaaaaaaattagccaggtgtagtggcrtgtgcctataatcccagctattcaggagactgatgtgggagaatcacctgagcccaggaagttgaggctgcagtaagccatgacctcactacttcactccagcctgggcaactggagtaagaccctgtctcaaaaaaaaataaaaataaaaaataaaaaaaaataacaagtctaaatatgcaattataaacatacaaagttaacaaaaaggccccaaaacacatctagcaaaaagcatcagaaatcaataatttagtaatacttggagacttccrtaccctgctcaataatgggtagaacaactagaaggaaaatcaacagaaaataaaagccttgaacaaaactacaaaccaacaactacaaacaaacctaacagacatctgtagcacacttcacccaacaacaggaaaatacgcattctgctcaagtgaacatggcatgttcttcaggataggccatccgttcatccataaaatataaggttccataaatgttaagaggttgaaatcattacaagtattatttctgactacaatgaaataaaccagaaatcaataatgggaggaaaaatggaaaactcacaaatacatggaaattcaatgatatacttttaaacaaccagtgggtcaaagaagaaatcagaagaaaaattgaaaaatacattgtgataaatgaaaatggaaacaatgtcccaaaattttggggacacagtgaaagtactactcccagggaaacttaaaaaagctgtaaacatctaggccaggcacggtggctcacgtgtgtaatcctagcactttgggaggccaacacgggcagattacctgaggtcaggagttcgagaccagcctggccaacatggtgaaaccccgtctctactaaaaatacaaaaattagccaggtgtggtagtacatgcctgtaatcccagctacttgggaggctgaggcaggagaactgcttgagcccagggggcggaggtttcagtgagctgagatcatgccactgcactccatcctggctgacagagcgagactctgtctaaaaaaaaaaaatactgtaaacatctgtattttaaaagaataaacatctggaatcaataatctaaccttcctccttaaggaattaggaaaaaaaaaagagcaaactaaacccaaagcgaggcaattaaaggaaatactagaaatgaaaaaggaaataaatgaaatagagaattcaaagaacagtagagaataaccaaggtaacaaaagttgatttgttgaaaagatcaacaaaattgacagacctgtaccaagactgaccaaagaaaatacagagaagttctaattcactaaaattagaaatgaaagaggggatgttactaccttacagaaatacaaaggattataagagaataccttcaaaaattgtgtgatgacaaataacttagattaaatggacaaattcatagatagacacaaaatactgagaatatatcaagaagaaatagaatatcttttttttttttttttttttttttttttttttttttgagacagagtctcacactgttgcctgggctggagtgcaatggcatgatctcggctcactgcaacctctgcctcccaggttcaagcaattctcctgtctcagcctcctgagtagctaggattacaggtgcctgccaccatgcccggctgcatttttaraagagacggggtttcactatgttggccaggctgatcttgaactcctgacctcgtgatccacctcccaaactgctgggattacaggtgtgagccactgcgaccagctgaaatagaatatctgaatagatgtataacaagtaaagatagaatttgtcatcaaaacacttcccccccyyttttttttttttttttttgagacagagtctctatctgttgcccaggctggagtacagcggcgcaatctcagcttactgcaagctccacctcccaggttcacgccattctcctgcctcagcctcccgagtagctggggactacaggtgcccgccaccacacccggctaattttttgtatatttagtagagacagggtttcaccgtgttagccaggatggtatcgatctcctgatctcgtgatctgcccaccttggcctcccaaagtgctgggattacaggcatgagccaccacgcctggcctttttttttttttttttgtgagacaaagtctcactctgtcactcaggctggaatgcagtggcgtgatctcagctcactgcaacctctacctcccaggttcaagtgattcttctgcctcagcctcatgatcaaatggcttcactggtgaattctaccaaaaatttacagaagaatttgcattaatctttcattaactctagcaaaaaatgggagagaaatatttaccaactcattctatgtggccagtattacctgatactaaaacaagtaaaatacattacgagaaaagaagattgtacagcaatatttcatatgactatagaaataaaagccattgacagaatcagcaacatactaaaaggattatacaccatgaccaagtaagattgatcccagcaatccaagactggttcaacatgctttataaaatcaattaatgtaatacaccatattaaaagaagactaaaaccacacgatcttctcaagatgcaaaaaaaaaaaaaaagcataaaacagtattcaacacattttcatgatgaaaatactcaacaaagtgggaatataaggttacttacttagctttaatgaggtcatctattaaaagctcacagctaacatcatacttaatcttaaaagactgaaatgtttttcctaagttcaagatcacgacagtgattttcactcttaccacttctattcaatattgtattggaggttctaaccagggcagtgagacaagaagaagaaagaaaggtatacagattggaaaggaggaagcagaactatttttatttgcaaatgatatattacattctaagaaaattctaagaaatccatttttaaaataacagaactgataggttcagcaaggtttcaggttacaagaccaatattaaaaaatcaatgacatttttattcactagcagccaaaaatctaaaaatgaacttaaaaaataccatttaaaataacatcagaaagaagaaaatacttagaaatatacttaactaaggagatgaaagatctgtatactgaaaactgcaagacattattgaaagaaaattctaaataaatggaaagaatcccacgttcatggattagaagacttatcattaggatatcaacactcccctatattgatatagaggttaaatacaatactaatcaaaatcccagctgactttctggcaggaattgagaagctgattctaaaattattatggaaaagcaaggaacccagaatagtcaaaacaatcttgaaaaagaagaacatactaggagaacaaacagttttctatttcaaacttactacaaagctacaataatcaagactatgttgtactggcataaagacagatgtatagatcaatgggtagaattgagggtccataaacaaattcatacatctacagtgaactggtttttgacaagagtgccaagacaactcaaagaaagaatagtcttttcaacagatggtgttgggacaactggatatctgtgcaaataatgaaattagactcctacctcacaccatatacaaaagttaactcaaagtggatcaaagacagaaaaaggcaaaaacagaggtataaattttcttgaccttgtattaggcaatagtttcttagatctgctatcagaagcacaagcaaccaaagaaaaagcagataaattggactttgttacagttcaaatttttattcttcaaaggacagtatcaagaaatggaaaagacaactcacatatggagaaaatatttgtaaatcatgtgtagcaggatctagtatccagaatatataaagaactcttacaacttaataataaaaagacaaaatgggccattaaaaatggaccaataatttgaacagacttctccaaaaaaggatacacaaatggccagtaagcacgtaaaaaatgatgttcaacatcattggttgttagggaaatgcaaatcaaagccataatgaaatattatttcacactttctagggtagatatatttttagaagggtatacaataacaaatgatggtgaggatgtggagattttggaacccttgtacgtaggtggtgggaatgtaaaatgtgcagctgctttggaaaacagtatggcagtgtttgaaaaagttaaacatagaattactatatgactccccaattccacttctaggtgtatgcccaagagaataaaaaacatgtattcatataaaaacttgtacccaaatgtttaatagcagyattattcatactagccaaaaagtggaaacattaacttataaatgaagtactgagaaatgatacaatatgagtgaatcttgaaaacatcatgttcagtgaaatatgccagatacaaaatgctacatattgtctgattcccgttaaatgaaatgtccagaattggcaactctctaaggacagaaagattagtggttgccagaggtaatggggaataattgggataatttggagtaacaattagtgggcacagggtttctttttggggtggtgaaaatgttctgggatagataagtggtataggttatacagccttgtaaatataccacaaaccattgcattgtgcactttaaaattgtttaataattattaaaaagtatgtttttatttttaatgtgtttttttaaactagcaaattgaatccaacaatctataaaaagaataatacaccatgactaggaatgcaaggatgattcagtgtttgaaaatgaaccagtgtaatctaccatattaacagtcaaaagaagaaaaactacatgttatgtcaattgaattttagaatatttttgacaaaattaaatgtttattcatgatttaaaactctcatcaaactagtaaaaaggacctttacaattatttataatacttaaggtaaaaaaaagaaaacagtctatgtggctaagaaagatcttagaatatattttctataattttcttgagtgcaaaataaaatacaacattttggatgcaagttatctgtatttggaaaaagtagggaatttttaatacatctagtttgttacattgtgttggatagcttctgtaacttttctgataataacaaattgtttaaaggaatctataaaattgatttttttccaattttctgtctgtcccactggaaaactggatttatttccgatgttataattatttgactttttccctattttttctagatgtattagacacagaaatgattggggagctcttattctagtggatgatcgctttaggaataacccaagtcgctatatatctggtaagatctcagctgggcttagagtaaaaactagtaacaatcttcatatttttattgtggtgaaaaacacataacatgagctctactatcttattaagtgcacagtacaatattgttaactataagcacagtatttcacagcagatatctagaacttttaaatcttacataactgaaacttaacaccaactgaacagcaatgccccatgtccctctcccccctgtccactgacaaccaccgctatactttctgcttctattagtttgactgttttggatacctcatataaattgaattatgcagtatttgtccttctgtaactggcttatttcagttagcataatgtcctcaaggttcatctatgttgcaggatttccttcttttcaatgactgcttaatattttattttatgtatacattataccatattttctttatccattcatctgtcagtagacatttaggttgtttccccctcatggatattgggaacaatgctgcaatggacatgggaatgcagatatctcttcaagatgctgatttcaatttttttgaacaaataccaagcgtaggatttggcgaatcatcatagttctaagtttaattttttgatttgatactgttcttcatagcaactgcaccatttaacattcccaccaatagcacacaagggttccagtttctccatatcctccctaatgcttatttccttttttcttctttttctttttaaaatttcataatggctctcctagcaggtataatgtgatagcacagtgtggatttgatttgcatttctctgatgaatagggatgttaagcatcttttctatacctgttggccaaatcatatgtcttctttggagaaacatcttttcatttgctcattttttaattgggttatttggatttctttgcatatctgtttttttggtttggtttttggtgtgtttttttgtttgttttttctattgagatataggagtttcttatatattttggggattaactctttatcagatatatgcgttgcaaattattttctcccattctataggctgccttttgactctgctgattatttactttgctgcacagaagttttttagtttaacatggtcttccttgtctaattttgcttttattgcctgtgtttttggtgtcatatccaaacaatcattgccaataccaagactggataatttataaagataagagatttatttggcttatggttctgcaggctgcacaagaatcatggcatcagcatctgcttctaatgaggacctcagaaagtctacaatcatagcaccaagsctttcatgagggttctgtccccatgacccacatacctcccactaggccccacctatgacatgggggaacacatttcaacatgagctttggaggaaacaaataaccaaagcatatcaatccccaatgacaccctgttgaagatccgctgaccatatatgtgtggatctgcttctgagctctctattatgttccattggcttatatggttctctttatgccagtaccatacttttttgactactacagctgtgtaatgtattttataatcgggaggtatgatgcctgcagcttttatcatttttctcaaggttcttttgcctatttgtggtcctttgtggttccatatgaatttagattgcagccgggcatggtggctcacgcctgtaatcccagtgttttgggaggccaaggcaggtggatcacgaggtcaggagtttgagaccagcctggccaacatggtgaaaccccatctctattaaaaatacaaaaattagccgggtgcggtggcgggtgcctgtaatctcaactattctggaggctgaggcaggagaatggcttgaacctgggaggcggaggttgcagtragccaagaccgcgccactgcactctagcctgggcaacagagcaagattctgtctcaaaaaaagattgctttcagtagtatggacattctgacaatattaggtgttccaatctgtgaacatgggatatctttccatttatttgtgttatctttactgtttttcagcaatgttttataatttccagtgtacaggttttttgcctccttagttgtttattcctaggtattttattatttttgatgctattttttttccctggtttgagtttttttattttaatttttatttttattattatactttaagttctagggtacatgtgcacaacgtgcaggtttgttacatatgtatacatgtcccatgttagtgtgctgcacccattaacttgtcgtttacattaggtatatctcctaatgctatccctcccccctctccccccaccccacaacaggccccggtgtgtgatgtcccccttcctgtgtccaagtgttctcattgttcagttctcacctatgagtgagaacatgccatgtttggttttctgtccttgcggtagtgtgctgagaatgatggtttccagcttcattcatactattataaatgggattgttttcttacattcctcttttggttgtttttagtgtatagaattgcaagtgattgttgtacattgatttttgtattctgcaactttactggatttattagtcctaacaggttttttttcaatctttagggttttccacataaaagatcatgtcatctgcaaagagagatcatttcactttattctttttcaatttggattccttttatttcattttcttgcctaatagtctggctaggattcttagtactaagctaaatagaagtagtgagaatgaacatccttgctttgttgctggtcttaaaagcttttcattttttaattttttgaagaaaaatgctttgattcctttctcatttttcttttgtataccttctatagatatttcctttgtggttacatgggtcttacatgaaacatagttataacaatattttcagctaacaaattcatttcagttgtataaactctacacttttacttttcccatcacattttattattaaagtcacaaattatacccttttatatagtgtatccactaacatactattatagttattttcatactttgtcttttaacttctgtatagaattaaacattatttatgtatcactgttgttatattaaagtattctgtatttgtgtacacttttaacttcacgagcaaactttatgcttttgtgttgctgtttagcaggcttcctttagcatatcttgtaaggcacgtttagtggtgaagtccctcagcttttgcttatctggaaaagtttttacctcytattcattttgatagatggctttaccagatataatatccttcactggcaggtttttttctttcagcacttcaaacatgtcatcccacttccttrcagcatgcaagatgtcgcctgagaaatctttctctttttggagacaggatgttactctgccacccaggcaggagtccagtggcatgatcatgactcactgcagcctcagcctcccaggctcaagtgatcctcccacctcagcctcagctgggactacaggcatgcaccaccagacctggctaatttttaattttttttgtagagatggggtctcactatgttgcccaggctaatctcaaactcctcggctcaagcaattctcctacctctgcctcccaaagtgttgggattataggcatgagccttcatgcccggcctagtgactgtcttatgggacttcatttgtatatgacaagttgcttttatcttgctgttttcaaatttctattgttttctttgacttttgacactttgattataaagtgttttggtacagacttttgggttcatcctgttcaggttcactgggcttcatgtatttggatgtcattttcctccccccaggtttattaagttttcggtcattatttctataaataagctttctgctcctttctctctttctctttctaggactcccagaatgtgtatattggtcagcttgacggtgccccataagtcaagtcataaatgaagccataagccttcacttttttttttccattttgttttttactttttgcttccctgactggatgatttcaaacgacttgccttcaaatttcctgattcttagcactttgggaggctgaggaaggtggatcacttgaggtcaggagttcaagaccagcctggccaacgtggtgaaaccccacctctactaaaaatacgacaattagccgggtgtggtggtacatgcctgtagtcccagctacttgagaggccgaggcaggagaatcgcttgaatcagggaggcggaggtttcagtgagccgagatggcgccactgcactccagcctgggcgacagagcgagactgtctcaaaaaaataacataacataacataacataacataacataacataacataacataacataacataacataacataacagaatataaaatatataaaataaagtaaaataaaataaatttcctgattcttccttctgcttgatcaagtctgctgatgaacccctgtagtgaatttttcagtccagttattgcattttttagctccaaaatctctttagttcttttttgtattctttatcattgttgaaattctcctttttttctatattattttcttgaacttgtgagcatcatgttgacagttattttaaattccttgccaggtaattcatatagcttttttttttttttaagggttggtttctggagacttattttgttcctttgacagggttattttttcctgtttctttatgtttcttgtaaccttgtatggtatccacacatttgaaaaaacagccacctctcacagtgtttactaactggttttgtacagggaaagaccttcactcatcagccctggtaggcattctgggagcctctcaaaccttttccgtggatctgtcttctttggacttctctgtaaattccttattagaaatatttgcttggtttttttttgttttggtcaaggtctcactctgtcgcccatgttggagtgcagtggtacaatctcagctcattgcagcctcggcttcctgggttcaagggattctcccacctcagtctcccaagtaactgggaccacaggtgtacaccactatacccagttaattcttgtattttttgtagagatggggtttcaccatgttgtccacgctggtctcaaactcctgggctctgggctcaagtcatctgcctgcctcggcctccctaagtgctgggattacaggcatgagccatcacgcctgactctcttttgttcttagtagattccaggcatacagagtatgctaggtccagtcagtactctatgacaagcaagacagaaacgagtccctagacagctccttgaaaagccaagatgttggatgcacactccaggcttttctgtccccctgagggagtggccatcaaactatatgggcctctgttgcactgtggttcctgtggagcagaaacttgctgcacagcgcttttgttcttagtggcccctgggcatgtagggtatgccagctcatgtcagctcttcagtacaggtaagatagaagccagtccctggggcagcctcccagaaaaagacataaggtccagttttctcttttctccccaggaagaagcagccaggtatattctgaagtggggatcatgacaagagggtgccacaaattttcctaccgctttgatgcaggcagtagtatcatttttttctcactcgatggtttcatccaacagtaaacagttttcagagtcaataccaggagtgattactaaagagctatgggatacatgtgtatctttattattaccttttagctaaaaaaaaaatacattttattataataaagagatgttaaattttgttttagattagccatgtgtgggtgtagactctaccttttcaatttcagagcttaatgactgtatttggtttgatattaaaacataaagcagaaaatattgctttatttgttttatcttccctttccacgtaaagtgtgcagtagcataggtcaaacagtaactaaaggcaaaaatgctaagtgctggtgtctagtcagcaggtggagctcagattctttcaagttttcaaaagcagacaatgatattttacattgaaaaggctttctttgattataaaaaggttgaaatgaagaggtaaatatagtactaaaattcttatttttatttacttatttcttttttagagacaggtcttactctgttgcccaggctggagtgcagtgacgtgatcatagttcactgaaaccttgaactcctggcctcaagcaatcttcccacctcagcctccccaaatgctgggattatacatgtgagccaccacactcagcctaaaaattttcaattttagagaatttcacatatttttatggtctaatcatattccccaaatgaacaaaataaaaaacttcaagggaaatggcttatttaaaatttttttagttttaaaatctagaacttaaatttttaccctatagtgacttttaaaactaattcctccaaaagatgatgctagttttagtagtgttagcagggaatatttattttgtaaaagtccaaatacctgattttgcatttcatttggaagcacaccatactagaaaacaccttaaactcttaggtttcatttttgtgcagtttttatgtcacaggtcaaatcatatcctttataacttgattatatattaaaaataattatatcataaaaattcagaagggatgtgatttacccataagacagtgttatttatttcacctccagaataattttaatttaagatatatttggaattggtggaggaagggaacaaaaaaacttgagactagaatcttgaaattatttttgcaaaaggagtaaaatttagaatattagaatggaaagttgtattgtttacaacttctagtttccctacaaaaaaaaaaggcaatttttgtggggaattatgatgaaattaaatttgccatgttcaccagttattcttaaccagagaatatgttttcccatctctgccctacttctactgcctctttgctctctccatttgacaattactgtatataaagagaatgttactcatatgttactgatacatatgtagtaaaattgctgaattgcagaaaaaacatatggagaaccattctgtatattcaaaatacaaattaggttacttcactagaaaaagcaagtgtattaccttagcatgtaatattttaataactaagtaaccaaattttccctgggtttacctttttctttaggactttctaaatgggtacggcagcagattcagcaccattcaacctttgaaagtgcactggartccttggctgaattttccaaaaagcatcaaaaagttcttaatgtatccataaaggacagaaccaatatacaggacaatgagtctacacttgaagtgacctctttaaagtacagtaccycaccttatttactggaagcagcaagtcatctatcaccagaaaattttgtggaagatgaagcaaagatatgtgtccaggaactacagtgtcctaaaattattaccaaaaattcacctctaccaagtagcattatctccagaaaggagaaaagtatgaaaagttcttcccatttacctttgatagagaagtctttcattatatttagtgaaatgatatttatttgggtatagatwaattccttaaatatggtggtttgtaatataaggtgttatcataaaatagtgaaacagtatggtgtactgtaatgggaacaaacttttgtcaggagaccagagcatattttctggttttccactaactggctttgccacttactagctttgtgatcatgagcaagtcatttgtcctttttgagtcgtaataggaaaaaaaaaatgcctgcctagctatcccttcaggttgggttgtaaaggtcaaaattataaatatcacagcattgtaaagtaccatgtaagtggtagatgttattctaaaggctatataaaaatttggcctaatttttatgtagatacttctatatgaactacttttcctatatagatagttcttatgaacttatttttaggaggtgagagacatttattttaagtgatgaaaaataatattttaaaatattttgaaataatcatctgtatcagattggcaaactgtggcccatgggccaaatttggcctgctgcctgtttttgtaaataaagtttaatgaaatgtagtcatgcccatttatttacattttagaaacaacagcagagttgagtatttgtgtgtattgcactagaacagcataattgagtagtcgcaacagatacattatgctccacaaagcctaaatattmctatctggcctatgacagaaaaggtttgccaaactctggtctattccattggatataatttcagttgttttaattcatatatccaaggcgggtggatcatccgaggtcaggagtccgagaccagcctgaccagtgtggtgaaacaccgtctctactaaaaaaatacaaaaattagctgggtgtggaggcagctgtctgtaatcccagctactcaggaggctgaggcaggagaattgcttgaactgggaggtggaggttgcagtgagccaggattgcgccattgcactccagcctgggcaacaaaagcaaaactcggactaaaaaaaagaaaaacatcaatttttaaacatgtattttgtagtatataagtactacaaaatagtaatacaattttgtatataaatactacaaaatagtaatacaaaattcactataaatagtgaattcaagccgattaacttggtaatcaggaaacctagtttctagtcttggtcttcttactaaccagttttataactttgagcaaataacttagccttatgtcactttccttatttattaaataaaagaattagtctaggtaagtttttctcagtcactggttagtggattttcaaggcaaatgtttacagcctgttccctcctttcctcagctcccttcctcttcccttttaccccttctttcctcattcattcttgagctccctgctgtggaatttgatagtttaccagacagcattataacytgggctaggaaacattagagacctaagatttctttcagagttaatattctgttccaagatgaaaatccactagtattcgttgggggctctaagttatgtatcctatacagttatttaggtatttctaataaataattattttaacctagcaattatgttagctaggagcagaaagttaaatctcttaaattcttgtattcttagatgatccagtattcctggaagaagcagggaaagcagaaaaaattgtgatttccagatccacaagcccaactttcaacaaacaaacaaagagagttagctggtcaagctttaattctttgggacagtattttactggtaaaataccgaaggcaacacctgagctcgggtcatcagagaatagtgcctctagtcctccccgtttcaaaacagagaagatggaaagtaaaactgttttgcccttcactgataaatgtgaatcctcaaatctgacagtaaacacatcgtttggatcatgccctcaatcagaaaccattatttcatcattaaagattgatgccacccttactagaaaaaatcattctgaacatccgctctgttctgaagaagccctggatccagacattgaattgtctctagtaagtgaagaakataaacagtccacttcaaatagagattttgaaacagaagcagaagatgaatctatctattttacacctgaactttaygatcctgaagatacagatgaagaaaaaaatgacctagctgaaactgayagaggaaatagattggctaacaattcagattgcattttagctaaagacctttttgaaattagaactataaaagaagtagattcagccagagaagtgaaagctgaggattgcatagatacaaagttgaatggaattctgcatattgaagaaagtaaaattgatgacattgatggtaatgtaaaaacaacttggataaatgaactggaactgggaaaaactcatgaaatagaaataaagaactttaaaccatctccttccaaaaataaaggcatgtttcctggttttaagtaataatacttaactctcaagctaagtaaaaatatgtcatcatgcttatgttaaactctgttgtaagtaataatttgtaaattgaataagtggcatactttttaaaaaactattttatgttcagaaatgtaaatgttattattcttgagtttttgggtttytttttttgagacagagtcttggtctgttgcccaggctggaatgcagtggtgtgctctgggctcactgcaaccttcacctccaggttcaagtgattctcctgcctcagccttctgagtagctgggactacaggtgtgcaccaccatgcccagctagtttttgtatttttagtagagatggggtttcaccatgttggccaggctggtctcgaactcctggcctcgtgatctgcccttctctgcctccctaagttgctgggattacaggtgtgagccacagtgcctggcccattcttgagttttgataaagtaattcatacaaagtaytgtcctcaaataagtcttccttagctaaatgcaatttaaaattattcaaagatcctagggcacttctagtttcacgtaaatattcatattaggtggttctcttcatccatttgttttcacactgatacataaaaattaacagcagtctaatctagtgacacctcagtcatatttcgctatagattttacctcaaatcagtccaagactttttcagagatcaccatttgtcttgaaaggtttatttcgttattaaactgcctacttataagtaattaagagaaattaagaaagtagtatgcatttttaattgaaattgttttacattctttgtataataaacctaaaaccaaacatgtcataaacaaattgacgtaaagatataaaatgccaaatgaagtattccaaattttctattctaattatttagcttcaccatcattgtggaaaaaaatactagatcctgcttagtattatatatttttcctagtggatcagtgagtaataagtaccaaacactagactagaaggtaatttctacattgtttagaaagggtgaaacaatttatcccctctggtattgttctagcataagctttagttatacaatgattaagatagaaaacttcatatataaatttgataagcaaacccacatttatagctgcagctaaaatatgtttccttagggcacagtaatcctttctgtgaattttgaccttgtttgtgtttttgtgaatgaagctatatgtctaatcaaaaatgattataaaagaggctcatctctgacatcattccaaaaatacattcattgatctctttttaagaaacatctgttattcactgggcattgggactttttgtgagtaatttgaattgaaattttatgagctatccaagaattctgtatggtctattattttcaagtcaaaatttccagtaaggatttactttacatttcatttggataaatgaatcattatataggtatgtctttgcttccattttgagacatttagatttttacagcctgtttctatagcatttgatgttacaactctaagcgtagttcaaagacatttaaattgacaagttaccagttaaagaatttagaatatattagatcccatctagtattatatattttttctagttgatcattgagcagtaaataccaaatactcgattagaaggtaatttttacattgttttgaaagggtgaaacaatttatctcctctggtattattcttaaaccacagatagggatagtagggtagtgaaacgaataaatacctggtagaagacaagagacttgggctctacacctggctctgccactgatttgctaagtcatattggcaatcaccacacccttcagggaattagtttcatctgtaaaatgcagcggttagtactataaaatcatacaaatttctttgtgctttgagaatctataaaggaatgtctgttgatattctgagtcgattttcatttgcttttgttccagaacggttaaaataaagcatattatttcatttaaaaagtaaagtggctcttactcatttacatttagggaacgatggtgacgtggtttggctatgtccccasccagatctcatcttgaattgtagttcccataatcccgacgtgttgtgggaaggacccagtgggaggtaattgaatcgtgggggcggttaccctcatgcggttctcgtgatactgagttcttatgagacctgatgattttataaggagcttttccctgcttcactctcattcttctctcctgctgccctgtgaaaagttgccttccgccatgattgtaagtttcttgaggcctcctcagtcatgcagaactgtgagtcaattaaacctctttcctttataaattacccagtcttgggtatgactttattagcagcatgagaacagactgacacagatggtatatgtgcataataacttggaaagctagatatttattttcgcaatgctacaattaaaacattttgaggacttttaaaattacctttagggccaggcgcggtggctcacgcctgtaatcccagcactttgggaggccgaggcgggcggatcacgaggtcaggagatcgagaccatcctggttaacacggtgaaaccccgtctctactaaaaatacaaaaaattagccaggcgtggtggcgggcgcctgtagtcccagctactcaggaggctgaggcaggagaatggcgtgaacccgggaggtggagcttgcagtgagccgagattgcgccactgcactccagcctgggcgacagagcgggactccgtctcaaaaaaaaaaaaaaaaagaaattacctttagaattggtaaactacatgagaaaattaagcatattattcatatcttagtgttattacccaacttcatctccaatactttcccctttccctagctagatatgtttttgtttgtttgttttagacagtcttgctctgtcgctcaggctggagtgcaaaggcacgatcttggctcactgcaacctctgcctcgcaggttaaagcgattctcatgtctcagcctcctgcgtagctgggattacaggtgtacaccactgcacccagctaatttttttttttttttttttttaagtatcgacagggtttcaccatgttggccaggctggtctcaaactcctgacctcaagtgatctgcccacctcggcctcccaaagtgttgggattacaggcgtgagccaccatgcctggcctagatattttttattctttccaaaatttaattctccctgaagttaaaaattttcattactgagaatgtacatagagatgtgtcacaaccctttagtaattccaaaaggtgtttcaaaaattttatacaatgataatcactgttgaaacaggtgtatattctcctcagatcatgactgaccaagatgatattccaagaagtaaactactggcctttatagagtaggatgtaggccattttcattactgataacwtacttttaaaagaaatgtttacagagttaaataagttaaaacatctaaatgcttttaaaagagcacctggcacattgcaagttattcattattaattagtagatgaatcatatatctggagtgcacccttgctctatatgaaagcttccctaactatagatatataggtgatagactgacaataaagatttgaggaaagaaaaattatttggctggcttattttttaagcttttgagatgtataaggtagagattgtttatcaaataatttatgtgacacattcaatgcatatgaaataattatctaatactgaatttattcaaggactgaaagtatatagagcacacaggctgcaaaccaggaaaactaccagttagagacagggctttattcttggaataaaggtacaatgtaaagagtagatgtttcatgacttgattaaattatttaaaactgtctagaattgtgttataaaactattactatgtttctatgcacttagttattacatgggtttaaatttggcactgtttctaagtttctataaggctttgttgttaagatctttctattcaaaacattaattttaacaaaaagcttttccccgttatttttctgcaactggacttttttgtattactttcctatattaaaacgcatttaaaatatttaattctttagggctgcttacaaaatttcatgaaatcaaagcacctgttgtcaaatcacttgaaaggctggttatcatggtcatctctaagtgatggcattcttttgtatttgattaccacacaattattctcgcatatgctcttttaaacgctgatttctcaatgagttacacaagaatttaacctttatgaattcttggtggtttattatctatttccataggtaaatgcagttaatcttttgtaaatagatagtattgatgataatcaaaaaaaattttaagaccagatcaagcaatgaatgtaagaaagctaaaaccttaacgtaaaataactgcagagctatgaaaaatacaataaagaacatcaggaaatagaaatttggaaaagtgaccaaggcttatgatcctctagccttaaacaattttcatgtctcaaaaaaaaaaaaaaagaattttgtttcttaagtttcatttgatagaaccattagctgcctggcttcctgtactccacaatggagccttgttataatatacatgggatctgagccagcagatcaccttattggtaagactaccttataatgaggtgctttcagtaactaaaccctcttggaccaggtccaaaacaacccatcttacaccaaattccactctgtaataaacaagcgtcaatgtattggaaagaaaacaaaagctatatgaaatttactgttcccagaaattaacctttgaaaacccaatggtaaatactgattaaaaggaatgtgtaacaaggcataattagatagatattttagtacattttataataactttgtattttcttggctcagtcttcctttattcgggaatttatattattttgattatcttaacgctttccccaaaatttcatcatttcacatgaaaatattttacattaatatttatagaattcaatattaaagtttgatttggctccttgctattataaaacacaaaattgtacaagaggcataccatttctgtaaactaggtgccattatcttttatatatgattcacatatagttgaaaagttttaaaagtatttagtactgtttgttattattttagatgcagtattgtcttcgtatattttccctgtttttcttttttttcctgtatttttattttttwaattaatttatttttattatactttaagttctagggtatatgtgcacaacgtgcaggtttgttacataggtatacatgtgctatgctggtttgctgcacccatcaactcatcatttacattaggtattactcctaagctatccctcccccagacccccacccccagacaggccccagtgtgtgatgttccccaccctgtgtccaartgttctcattgttcaattcccacctatgagtgagaacayggggtgtttggtgttctgtccttgtgacagtttgcttagaatgatggtttccagtttcatccatgtccctgcaaaggacatgaactcatccttttttatagctgcatagtattccatggtgtatatgtgccacattttcttaaaccagtctatcattgatggacatttgggttggttccaagtctttgctattgcgaatagtgccgcaataaacatatatgtgcgtgtgtctttatagtagcatgatttataatcttttaggtatatacccagtaatgggattactgggtcaaatggtatttttagttctagatacttgaggaattgccacactgtcatctacaatggttgaactaatttacactcccaccaacagtgtgaaagcgttcctatttctccacatcctctccagcatctattgtttcctgactttttaacgatcaccattctaactggcatgagatggtatctcattgtggttttgatttgcatttctctgatgaccagtgatgatgagcattttttcatgtgtctgttggctgtataaatgtcttcttctgagaagtgtctgttcatatcctttgcccactttttgatggggttttttcttgtaaatttgtttaagttctttgtagattctggatattagccctttatcagatgggtagattgcaaaaattttctcccattctgtaggttgcctgttcactctgatggtagtttcttttgctgtgcagaagctctttagtttaattagatcccatttatcaattttggcttttgttgccattgcttttggtgttgtggtcatgaagtctttgcccatgcctatgtcctaaatggtattgcctaggttttcttctagtgtttttatggttgtaggtctaatatttaagtcttcaatccatcttgaattaattttggtgtaaggtataaggaagggatccagtttcagctttctacatatggctagccagttttcccagcaccatttattaaatagggaaaattcctacttaatattggtctcttttttggttgtgtctctgccaggctttggtgtcaggatgatgctggcctcataaaatgaattagggaggattccctctttttctattgattggaatagttagagaagaaatggtaccagctcctctttgtacctctggttgaatttggctgtgaatctctctggtcttggactttttttggttggcaggctattaattattgcctcaatttcagaacctgttattggtctattcagagattcaccttcctggtttagtcttgggagggtgtatgtgtcgaggaatttatccatttcttctagattttctagtttatttgcatagaggtgtttatagtagtctctgatggtagtttgtatttctgtgggatcggtggtgaaatcccctttatcattttttactgcatctatttgattcttctttcttttcttctttattagtctcgctagtggtctatcaattttgttgatcttttcaaaaaccagctctgaattcactgacttattttgaagggttttttatgtctctatctcctttaattctgctctgatcttagttatttcttgccttctgctagcttttgaatttgtttgctcttgcttctctagttcttttaattgtgatgttagggtgtcaattttagatctttcctgctttctcttatgggcatttagtgctataaatttccctctacacactgagagattctggtacgtggtgtctttgttctcattggtttcaaagaacatctttattcctgctttcgttttgttatttacccagtagtcattcaggagcaggttgttcagtttccatatagttgtgtggttttg

SEQ ID NO: 93509 - DNA, 12699 bp, Homo sapiens
tctgttttgtgagaggctttccacagatgcttttcttttttcttggaattgtctgtttcctttgacaatttttctttaacttcgatacatttttcttgttgctattgaacaactctttatatattaaggatattagctctctgctttagtatggtcataattttcttagcaattaattacttgcctcattaagacatctgcatagaaaattttaattgctatttggttatatttagtgatcattttatcttggtggtttcagtaatacttagacaaaccttccacaatggaagattatattttataaaatgtaggtttttctaaaatttcaatggtttctctcattttttacattgatattattcgttcctacagaattaattttggtgtaaaaagaaaagatttcacttccttttttcccacacagctagacacatgtatcaacataatttattgagaaatacactgattggaaacgtcattggtatcagttagggttgtatttggctggatattttataagccttaccaaagtcattaaattaaaaagatattttccaacatttaagcagagatccacagatgaaaagtgctggactgtttttgcattgccattactgtctctaaaatcctgctccttatatctttattcttacagtttcctcatgtgatgtaaaggctgctcaacccctcacctaaaatcagtatattcagacaagaaggaagaagacagagcagaaaaggaggggaaaaacaaggagaaggaggatgaagaagaggatgtgatggtggtggtaataaggagaaataggcaatgcctttaacaggaaaggacctgtccctaaaccccagtagacagctatttacatcttctttagaaggctgtatcttatggacatatttgctgcaagaaaggctaggaaatgatttctaaagctggacatattgttaccttaagcttgtatgcggctcccattagtaaaagaaaaaaggacaatggatgttggatatataactaacagttgggtaccaattgctacatgcacttgatggatgatttagtgcatttggttgtgtataaaataataatgcagagtattttataaaacagaacatctggaaacaaattagttatatgtatttaaaaataagaaaaattaataaacaaggcaactattgacttcagggaaaacaaagaactgtataaaaactcaagcaatcataatttattatttatcttaacaataaaccttgcttttacagtcataataatataaacattgaaatctttctgacttcagaagataagaaaaaatatttcaaacttagcctttaaagttcaatttattcatccttgctcaactcctgagccccaggttacaatgcatcaagaacctccctgaggagactaataataactaatatcacagacaccctgggttcaagtggatatcacatcaattaagacaactctccatcttaactctttaaaatatctctagcaagtggttacttagcttctgcttgaacacatccactgacaaggagctcactggtctggacagtttattcaatttctagacagctcattcaatttctggacagctctaaacactgcaaatcattccctgtaatcaggtgaagggacctactctaactttaatttagtctttcttttttactcccttaagtcctacagaacatacagttcttctttcacaggaggaatagatatctgctatttgaatactattgccaagctatgcactctctgtcctctttatgttaaattctttaggcccttcaaacattttaaaatgatatggttttatattccagtgacattttagacatgttatctggaatacatgtcatctagttaatgtccctcttaaaatgtggcaccatagcagaacatggttgccaaggaaaaaatatgaaaaaccatgtttccaaatttcattttctattaggagataccttgtaatatgattaaatttccttttaaatctttttgggatcgtcttggaagaagataagattgttggtctttaaaaaaaaaaacttacggaaaagtatgaattccatcttctagaactttacgacatgtttccattcactatccacaatactaaaaaagtgccaaagtctaggtatgaagtaagaaaaaatggggtctgggtgagccattctctcttttaggaatcaaagaagaattgtaaactaagatatttttcaacaatcctaaatatcagattactttaggataaaattattttccaatactctgtcctagtcacatggagaagatgtcccaatttgctgaattcaaacagccagaagctgtttctgatctgcagtctttttcagtgttctttttcttcgtatctgcttattcctctttatactgatttagaacacactaatggaagtagcctgacacgtggctttccattttgccactctttctcaagaaatgtgattaaagaacttggagtgggctgctttatgcacaaatattcagacagtctcttagcaataaatggctgtcgcttctattatctgtctggctctgagttctattatctgttgtgaattggtgcagggctctgtaaaacagtttttaggcagcctcattacacccttccacaccttctgctccatctgagtgatactgctgtgattgctgggtaatgtttgccattagacgaggcacaaaaaagaatcaagctatgactaattcactcgatggctgtgtgccctgtgtcatgctcattaacacctytcaactctgttattaaagagaatcacacagcagacctcagcgggctcacatttatactataggctgccttatttttccattggaaccccatttttatcacagactagtcctgagcacccttaccttctaccccaggcctattccatcctgttacactcataaatgcttaggagaatctactgataagaaaggcctttagattgtctgaaaatgagggttttgcccactgaagaatcagccaatctgatttcagctgaaaagtcatcctgagatgctcctaatgaaagctcaatgaaagaaataacaataacaacaccttaaactatttgttgaatttattaaagtatatccagcccttttataaccattatttcccttgaggttcacagcaaccctgtatggtaagctgcataaacagtaccctactattagcttcaacactagatttctaactcagaggcgacattatataaaagactaatagctcatctacaatgctgagcaaaatgtaaaggaatagcatcatttttgttaggctttctcaagcatagtaatcaaagtaatagaaaaagcagaaagagagagcgaacatttttcttagtactgactcatgtgttctaagatgataggggcatcatacttaccttccttagtcatttaactccaactgaatagtcagtcagtcagaagtccataggactttggggtccatagggtaagtattgcaattgttcaccaatatctagatatgctctacttctgagtacatgaaggattccactaatccacctctcgaagttggacatggccatttgacttgatttgaccatgaaatgtgagtggaagcatttaattgcagatacaggattctctagtttggctcttcccgtaccataagaattgtaaaagcttgtatctatatggggagaccaaaatatttaagcaattaaaatactgagtcagcacatgggacacagttgtcctgtagaaacacctagatcttcagtagaaaccgaatgagcagtaaataagactgtgtcaccaaaaaaaaaaaaaaaaaaaaaaaaaaaactactgtaggtcaggtgcagtggctcacacctataatcccaacactttggcagaccaaggcagtaggatcacttgaggccaggagtttaagaccagcctggacaacacagcaaaacctagtctttacaaaagaataaaaaagttagctgggtggggtggcatgtgcctgtagtcccagctacttgaraagcttaagtgggagaatcatttgggccaaggagattaagactgcagtgagcagtgattgcaccactagactccagcctgggtgacagccaaactctgcctcgaaaaaaataattactgagattttggtgttatttgttaccagagcataacctaatctctactgactgatgcaatcttcgtttgctctagatgtatcatacaattgagctatttttagaaacaaaaaaaattagaaaaacattagaaatgaaaaaatggggaaaaacactgtaattgggctaacttgaatactatgtcctccatggaacaataaactacagccaaggttaggatcaaggtcgtgaaaaatcatggtagctcaactaacactaattaattggaatcaaaaaaaataagagtttctaaatagaaataagaagtatcaataataaagagaagccctctttggattgtatcttagggtgaatccattggggaaagtgatgataacaaaaacaaattcaactttgggaggccgaggcgggcgtgtcatgaagtcaagagatcgagaccatcctggctaacatggtgaaaccccgtctctactaaaaaatacaaaaaaaaattagccaggcgtggtggagggtgcctgtagtcccagctactcgggaggttgaggctggagaatggcgtgaacccaggaggtggagcttgcagtgagccgagttcacgccactgcactccagcctgggcaacagagcaagactccgtctcaaaaaaacaacaacaacaaaaaaaaacaaattcaatattctggtgggaaagggagatccaattatctctaacatgggtcagtgacagaatttagcaatgtatttctaactatttgaataattttccagaaagagatttcctgggccagccggatgcttttctgtccattctctctcctactatagggcaccacttactcaccagaaaaacttgaagcctgaactggaagccttctatctagattctccagaacctcctttgctctatgattccagatttgactttgctgataagaagaactcacatgagattttgaaaggcaggacttgggggatcaaggcaggcacatagctaaccagaaggaagttattcagctaaccaaaatagtcagctgggggctctccctgaaaatcaagaattgcagcagtttcctaatacattttataactactcactacagagtttcagggttttttccctaacattttggatatacccttcctgatttctctcccaggtaatccctaatttctatattaaactttactatttctgcattgctttacatgactgttttcctgttctaacaaggactggaacaggtagagatctagttggatacaggtagagagattctaggctggttgactataaagtacttaaaatggtcaaaaatcagggtaggtttggtaaagagataatgaaagaaagagagagagaatgagaatgaatcagcaaattgattgaattccctttgaaataatacagcaaaccccagggtcctacatcagaggacatatttccctacaaaatgtttgagttttttttttcttttactatgaaagatacaagtgatacaattgatgaaatgtgaataatatctataagattaaataatgttgcattcaagttaatttcatgataatgattgtaccctggttatgtaaaagaatattcctattttttggatgaattcagggcttctgggcagcagccttctctagttccgggtgtgcagaggtggcctctcccaacacaggccaggctgcacacagtcgctggctccaggactgtacagggccgcagtccacgttgctctacatcctccctaccgtcaggcagattcccatagtagcatccagtagggaaatggtcgtgctttcagtgcccactgaagtcaacctgatcccattagacgtggaaggacattttatttccttatattgaagaaaatgttagagtatctgcagacatattgggcagaagaggagtgcccgcaggatatcaatctcttgaggaaacaagctgaagaggatggggctgttcctatccctgcagcaggaagatatgcggcctgggaatggagtggatgatctgcaacagatgatccaggccgtggtagataaggtgtgctggcagatgtccctggacggaaagaccaccatgttcaaacagctgcaggaccacacgtgaagggcagcattcacagctcggcccatgaaagcggagttctttgcagatgtgtttccagcagtcaggaagtggaaagaggctggaatgaaggtgtatatctattcctctgggagtgtagaggcacagaaactgttattcgggcagtctgcgaagggaaagattcttgagcttgttgatggtccctttgataccaagattggacacaaagtagagaatgaaagttatcaaaggattgcagactgcactgggggctcaaccaacaacaytttgtttctgacagatgttactcaagaggccagtgctgctgaggaagcagatgtgcacgtagcggtggtggtgagacttggagacataattgaaagatgatgagaagacttactacagcctcatcacatccttcagcaaactgtacctgccctcctcaacctaaagaagggtttccaaggaagaccacactgtttctcacagagttgtccctgttgtgtccagttttattctaatggtaaaagtaacttacttagaaaacacacatgtatacacatatgtatgccagtatatatatatatatgtgtgtgtatatatatatatagtatgtatgtatgtatgtatgtatgctcaaattaacttccacaggaacataagtgaaaatagagagtcagttcagtgaaaacaaaacttatttaaagatgcttatatgtagaaattgtttgaaatcatactctaaatcttactgagggcaaagtgtaattgatagaagaaattgctaaaatacttacctaatgtgtgatgtttataaagtcatgtaccaaaatggaaagctactttgagaaattattcagaagttttgttattttaataacgaaatatttcaaagacttgtaataattctgtgcccctgtttaactgtgatttagaagattataacagccgtatttcatatttgactccttacatatcaaagacaaaggtttttgtttctgctccaaaagagagcaaaattgaaaaggaaaactcacttcagtcttgatcartcaagtgtctttaacttaagaagaaacttgctaatcagcatggcacccatagcaaacagctgccttactagtgaaaaaggtacactgatggaacagctaaaatagcgatgtggctcctaatgyttaacagaacgatcctaatcctgctggtcgttatcattacagattttatagttgcctttttaactgcttctgagcacagtttgaaaatatatgttaattgccattgactatttaaaatagtttttactgaaatcagtccataagattaagacaagccctaataagtaatattttcctttggaatggaggtgagaaaggtaaatttcataacaccagtattaatcttggtttaattctaataggatgccacgtcaactgcatgttgtgattaataaaagcattttattcttaaaaaaagaatattctcgtttttcatttttgtgtttgtttttgtttttgtaagacagagtcttgctctgttacccaggctggagtgcagtggtgcgatcttggctcacagcaacctccgcctcctgggttcaagcgattctcctgcctcgatctcctgactagtttgatttacaggcacgtgccaccatgcccagctaatttttgtatttttagtaaagacagggtttcaccacgttggccaggctgatctcaaactcctgacctcaggtgatcctcccgcctcagcctcccaaagtgctgagataacaggcatgagccactgcacccggcctattcttgttttctgaacgtacacactgaagttcttagagtttgcaacttactctgagagggttcaataagattagatagaaataaataaataaataatgactaaataaatataaagcaaaggggctaaaatgttaactatttgcgggcactatggataaattacattcagacatttcttgcactatttttgtaactctttaatgtctaatagtattttaaaataagatgttggaaacatttattacaataatatggagtcaatgttgttttttttaatctctcctgctaagcacaactaaaacccctgaacacatatatgaaacaaacaccttgtctgaaaggcagagagaagaaggtagatagtctagggaccttaggatacaggagacaacacagtggtgagttctcttttcatctcacataactcaaactttgcagtgcagaagatggaaacccagaaacactgaatgggcccagacaaataaataaagtctcaccaaaatcagctctctagccaaagggccaggaaagggggagcctagcaagacagaaatacttttgacaataaccaccctattctacccagacttcacagaaaaaaacttatgcctcttttcacgtacaccagcaaaggccaaggaggaacctggaattccacgctcacctggctgtaatgagccccttgcaggaggagtgcctgagatggccaagttagaagctgaaactttcatcgctatagggcaaggacaatttctcccacccactcaatgtcagtcgaaaccacagggagagcctggacttccatacccactaagcagaaatgaaacactctcttattcccttctggagtcctatcaaaaagggcctagtacagagttagggctttcaccgtttcccatggtcctgagactgccaccaccatcaccaccatcaccaccatcccgtgtgggaagtgaagaccatgtggacatcagtaacctagcactcgtctcttccatctaagcaggtatcagcagaggctcccagtaggagcagtaagtaactccactcagcagtaaggaggaacccactctattgtgtgtcaatggaggccaagttggtaacaagacagtgtccccctctttccctaccgaagtggtgtcagaaagaacaagctaaaacagaaagttattaataagatccagttttttataatgtaatgaccaaaatgtccagatttcaatttaaaacattcatgccaagtaccaggaaggtcttgaactgaatggaaaagaagaaaacacaatcaatataagccaacactaagatgtcagtgacattagaattatctgacaaatattgtaaagcagctatcataaaaatgcttcaatgaacaattattaacaccattgaaacaaatgaaaaaaaaacaaaaaatcctagcaaataaatatttctcagcaagaaatataaaatattataaaagacaaaatgaaaatattagaacttaaaaatgtaataactgaaattaaaaactcagtgatgggttcaacagcaagatggaggagacataataattaatgaactttaagaacagtagaaattactcaatttgaacaacagaggaaaaaataggctaacaaaaatatgaacaaagtctcacttcctgtggaaatataacaaaagacataacatttgtgtcattgaaatgccagaattaaaggaggaaaactgaggagctgaaaatgttcttaatggaataactcaaactccccaaatttggccaagaaatttccataaatctgcagatccaaaggctggatgaatcacaaagagaaaaaaaaaaaacaaagaaattcataacaagacacattatagtcaaagttctsaaaagaaataaaaattgaaagtgatgaagaaacagtaaaacgatacctacataagaaaaaaaatcaaataacagtggatttctcatcagaaatcattaaggccagaagaaagtgacataacatttttccatgtgctttacaaaaaaaaaattgtcaagtggtaatctattagccagtgaaaatattatttaggaatgaaaggaaatcaagacattttcagatgcaaaaaaattaagataatttgtcagcagaaaatttataatagcagaatggctaagaaagttctctaaacagaaaagaaataactttttaaagactcttggaacatcagaaaaaagaaagtaaatgataacaaaaatataaacaaataaaatagactttcctcttcatcttgagttttcctaactatgatgattgaagaaaaaattacaacactgtctaatgtggagttaaatgtatatagaggaaatatttaagaatattatcttataataatattatgttaagaaatgcaaaagaaagtaaagtttatacacttcatttaaactggtaaaatgctcacgcctgtaattccagcactttgggaggctgaggcaggcagatcacgaggtcaggagatcgagaccatcctggctaccacggtgaaactccgcctctactaaaaatacaaaaattagccgggcatggtggcgggcacctgtagtcccagctactcaggaggctgaggcaggagaatggcatgatcctgggaggcagggcttgcagtgagccgagatcgcaccaccgcactccagcctgggcgaccaagcgagactctgtctctaaaaataataataataataataataataaataaataaataaactggtgaaatgatgatacaagtaaacagtgataagctatgtatatataatgaaaaattaacagcaaccaccaaaaatgctgtataaagagataacactccaaaaggtaagaagaagtcaaaatgaaatgctaaacagtattcacataacacagagaataacagaaaaaaaagaaaacaaagaaacacaaaaaatagaataaacccaaaccataaaattaaagggaaaacttaaccttaagagatcaataattacgttaaatataagtgaactaaatatatcaattcttatttaaaaataaaaacagagattgacaggagaaaaaagaagaagaaagtgggagaaaaaagaagaagaaagtgggagaaatcactctgactgatattaaggctttatcaatacagtgtggtatttggtggaggaatagacacgtagatcaatggaacatgtcagggaacccaaaaacagactcatacacatatgcctaactgatttttgacaaaggtacaaaaacaatccagtggaaaaaaggtggccttttcaataaatggtgctagagtaattggatttctatagacagtgaaccgtgacataatcctcacactttgtataaaaattaactcaaagtgaatcatggactcaaatgtaaattacaaagctaaaaacattttataataaatatagaaattactctggcatattgttagctaggcaaagaattcttagaattgacactaaaggcatgatccataaaaagatacaagtgataaagcagatttcatcaaaattacaaacctttgatccacaaaacacctctattaacgggaggataagacaagctataaactgggaaaatataagccaagtacatacataacaaagaactgctattcagaatatataaaaaccctcacaactcaacagtagaaacaaacaagctcatgaacagaagtccatcatcattagccattggagaaatgcaaattaatatcataatgagataccaatatatatccagtggaatggctaaaataaaaacatagtgacaacatcaacctttagtgagaatgacaagaatttgagccatcctttacattggtctgggaatgtaaagaagtacagccattctggaaaacaggctattttcttttaacttaatatgcagctaccctatgacccagtaattgcactcctggccatttattccaaagaaatgaggatttgtgtctgtacaaaaacctcctatacacagatgtttatggcactatattagtttgctagtgctgccattaacaaagtactgcagagtggtttaaacaccagatatttattgtctcacacttttggagactggatgcccaaaccaaggtatcatcagggttgctttcttctgagtgttgtgagagaggatctgctccatgcctctcacctcacttctggaggtttcctggagattggtgtcccttgacttgaagaagcattgccccagtctctgacttcattttcacatggcagtctctcagtgtgcatggctgtctctaaatttgaccttttcataaggacaccactcatatcgaataacggcctacattaatgattgtattttaatttgagtacctctgcaaagaccctacctcaaaatagggtcactttctgaggtattgggggctaagaattcaactttttaggagaacaagattcaatctgtaacaagcacctttgtaatatcccataactggaaacaaccagacgtctttcaataggtgaatgtttaaacaaattctggcatgtccatatcgtagaatattactcaacaatagaaagaaaaatatattgatctatggttactacctggatgactttccaggaaactgcactgagtgggaaaagccaatcccaaaaggttacatagagcatg

SEQ ID NO: 93510 - DNA, 67759 bp, Homo sapiens
  misc_feature (1)...(67759): n = A,T,C or G
ggaaggggaaaaaattaaaaaaaaatgtgtgtgcatgatggagctgctgctagattggtgagtttttgagttctgaatttcctttggacctgtggctgaagttgtaaaacctaagcttgtggttgtttttgtgtgtaaaaattaaaaataaaaagccttttcccttcctcataaaagcaaggtatagtaattaatcttttataatatcttgtttgtaactctttctgtctgtttctcaactttggagacagataggtcacaaacctatatgtgccatctaggggtatctagtgtagacacacagaattttttttttgttgttttgagacgaagtctcgctcttgtcccccaggctagagtgcaatggcgtcatctcagctcactgcaacctctgcctcctgggttcaagcaattctcctgcctcagcctcctgagtagctgggattacaggcgcctgccactgtgcctggctaatttttttttttgtatttttagtagagatggggatttcaccatgttggccaggctggtctcaaactcctgacctcaggtgatccacccaccttggcctcccaaagtgctgggattacaggcgtgagccactgtgcccagcctttttttttttttttcttttaatcacagttcttaacaaacttccataaatacccaaaaggggaaaagaaatttgagaatatgaaagaggttaataaatagccaaatatgtcaaccattgaaaggacacctatttttattttagattaaaccactgatttgcaacttttattgaaataaatgtcatttgttaaaaacaaggtnnnnnnnnnnnnnnnnnnnnnnnnnnnnnnnnnnnnnnnnnttaattttgtaacttgatctcaacttgtttttttaatagcagttacatttttacataaaacattgcaaaacttcaactaaaggctgggcgtggtggctcacgcctgtaatctcagcactttgggaggctgagatgggcagatcacgaggtcaggagatcaagaccatcctggctaacatggtgaaaccccgtctctactaaaaatacaaaaaattagccaggcgtggtggtgggtacctgtagtcccagctacttgggaggctgaggcaggagaatgcgtgaacccgggaggcagtgcttgcagtgagctgagatcgcgccactgcactccagcctgggagacagagtgagactccgtctcaaaaaaaaaaaacaaacaaaaaaagcttcaactaaagaacaaataaaacattcagacacaagttgacactttaaaaattctatagatttcaacaaataatgaatgactgtatattaatttatattagtcctgtggtcagaatacattttccagttaaaacatttttaatacatcttctgtacggcacggatagcttctagtgggaattagtgtatagtctgttcttgatgaagacaacactagacagatgttgcctgatatctggataatgctgaatgtgacaaaaccagcgagacgcattaagatatttcttcttttcttgaactgtcaggtcaactataaagcgatgaagtccatagtacaataggatatctgcaaaggtagttatatcctgtaaggtagactttatcttcaagatatgaaataagatccttcaacagggtgtgggctgggcatggtggctcacgcctgtaatcccagcactttgggaggctgaggtgggcatatcacaaggtcaggagatcgagaccatcctggctaacatggtgaaaccctgtctctaataaaaaaaatacaaaaaaattagccgggcgttgttggcgggcgcctgtagtcccagctattcgggaggctgaggcaggagaatggcatgaacccaggaggcagagcttgcagtgagcagagatagcgccactgcactccagcctgggtgacagagtgagactccatctcaaaaaaaaaaaaaactaaaaaaaaaaaccagtgtgtggctatcatttttactggagtgactctgtattgtaaccattgctgaactattgctttttcttctgcagtactccctagcaaatatcctttgttagcttgcttgactagatgagctgctatagtagtcaatcctgttagacttggaccattgtttgtttgaagaaccagaatctgtcactcatcctgagcactttatttattattccccttactcagtcccagggacttctctagtagtgacaacttggcggctgctgccatcttctggcggtagctcctggaagagaccaacgtttaactttttgagaacctgtcaaactgttttaccaagcggctgcaccattttacattcctatcaattatgtacaaggggtcaaataactccaaatcttcataaacacttgttattgtctgtctttttgattacagctatcctactgggtgtgaagtggttttggcttacatttccctaatgactaatgatgttggtcatcttttatcgtcctttttggccacttgtataatatatttttggcaaaatgtcgttcaaatcctctgcccatttttagactgggttgtctttttatgttgagttgtaagacttcttcacatattctggataacagactcttatcagattatttgcaaatcttttcccccattctgtgagttgtcttttcactttcttgacaatacctttgaagcacaaaatttaaaacttttctccaacttatcaaattttttcctaggttccttgtgctttaggtaccatatttaagacatcattgcctaatccaaggttatgaagatttacagctatgttttcttctaagtgtatagctttactctttttttttttttttgagacgaagtctcgctcttgtaccccaggctggagtgcaatggcgtgatctcgactcattgcaaccgccgcttcccaggttcaagtgattctcctgtctcagcctcctgagtagctgggattacaggcgcctgccaccacgcctggctattttatttatttatttattttttgtatttttagtagagatggggtttcaccatgttggccaggctggtcttgaactcctgacctcaggtgatccgcctgccttggtctcccaaagtgctgggattacaggcgtgagccaccgcgcccggcagctttactctcatatctgggtctttgatgcactttaatttttgtatatggtgtgtagtatgaatcaagattcattttttccatctgaatatacaaatattgcaacactaactgttgaaaagatgcttccctccttcatttgcttttgcaagtttgtaaaacaacaacaaaatcaactggcctcactctgtaactgagggctgcacatattgtcttccttccaaagagtacaatatggaaagtggggaaatgtaacatcatagtagagaaatctgacaaacactatctcagttaggtgatcaaggttgacatcagcagcgataagtgatactgttgataagtacctttgatatgatgtgatgaaaatgacactttatgatcttccttcctgaaatccatatccccaggctaatcatgaagaaacatcagacaaatttcagttaagggatattctacaaactaatgcagtggcttgcacctggagtcccatctgcttggggggttgaagcaggaggactgcttgagcacaggagttcaaggctgcagtgagctgtgtttgtgccaatgcactctagcctaggcaacacagcaagactctcttaaaaaaaactgaataaagtatgaattttaattactaataatgtgttgatatttcattaattttaacaaatgtactatactaatgtaaaatactaataatagggaaactggatgtagaaactgggtatagggtatgtgggaaatttttggactatctgcagtttttctgtaaatctaaactttattattatactttaagttttagggtacatgtgcacaatgtgcaggttagttacataggtatacatgtgccatgctggtgtgctgcacccattaactcatcatttagcattaggtatatctcctaaagctatccctcccccctccccccaccccacaacagtccccagagtgtgatgttccccttcctgggtccatgtgttctcattgttcaattcccatctatgagtgagaatatgcggtgtttggttttttgttcttgcgatagtttactgagaatgatgatttccaatttcatccatgtccctacaaaggacatgaactcatcattttttatggctgcatagtattccatggtgtatatgtgccacattttcttaatccagtctatcattgttggacatttgggttggttccaagtctttgstattgtgaatagtgccgcaataaacatatgtgtgcatgtgtctttatagcagcatgatttatagtcctttgggtatatacccagtaatgggatggctgggtcaaatggtatttctagatccctgaggaattgccacaccgacttccacaagggttgaactagtttacagtcccaccaacagtgtaaaagtgttcctatttctccacatcctctccagcacctgttgtttcctgactttttaatgattaccattctaactggtgtgagatggtatctcactgtggttttgatttgcatttctctgatggccagtgatggtgagcattttttcatgtgttttttggctgcataaatgtcttcttttgagaagtgtctgttcatgtccttcgcccactttttgatggggttgctaaactttttttttttaaaaaagtttaaaatattggccgggcgcagtggctcacgcctgtaatcctagcactttgggaggccgaggcgggaggatcacgaggtcaggagttcgagaccagcctggccatcgtggtgaaaccctgtctctactaaaaatacaaaagttagctggacgtggtggcgggcgcctgtaatcccaccttcttggaaggctgatgcaggagaattgcttgaactcgggaggcggaggttgcagtgagccgagattgtgccacggcactccagcctgggcgaaagagcgagactctgtctcaagaaaaacacacacacacacacacacacacacacacacacacacacacacaaacaaaagtttaaaatatcaattaggtatatttgtatttaactgtttcatgaatctttgtttctaacctttctcctataacccattctttttttttttttttttttgagacaaggtcttgctctgttgcccaggctggatggagtgcagtggcgcgatcatagctcactgtggcctcaaactccckgctcaagtgatcctccagactcccaagcagctgggactacaggtgcgcaccacgcctccaggctaattaaaaaaatttttcttttgtggagacagggtctcgctatattgcccaggctggtttcaaactcttgggctccagcaatcctgtcgcctcgcctcccaaagtgctgggattacaggcgcgagtggccgctggggttcttaacttgggtctttgaatcgccttaagaagtgtctctgaatctgggaattgcaagcaacgtttctgtgaggaccttcacacagttcatccactcttcgaagagtatggaccgaaaaaggcatagagcattcactgcacgtagagaaaatcagcaacccctgctccccaccctcagcctgaggtgcctacctccacgtggggtcaggaggcggaagcgaaaccagaagaaaaaaccctgagatctataaggcagttcaggtccctagtgacatgagctaaagagaacttggacgccaggactgtagcagacagaatccggcttcggggttcgcatcagtcgcacggaaggtggaaatagcccccaagttataacccgccgcggtcttccctcaacagcgcaggcgccaggactgctaggacgccgcgcacctcccgcgatgccccgccccggcgcgaggcaagacgggaaagtcaagatggacgcgtccatttgaacgtctcgcacgccttcctgccattagcactcgagcccgctgctgttgcccgttcttcctccrgaataggggagggagagggaatgagaagctgctgcggcccaagagtcactgtgaaggaccccgccgctgccctcgggcctcctcggcccctgcgcctccggggagcagccggggctcgccgcgcctgacgcgtcccgagttatacaggtgcgggcgccgtaccgcagcacttggtggtctgtcgcgcgccgcgtgactctcgcacccgtcccgaggccgagcctcccctggtggccgtaggtctggaaacccggggtactgggaacccgagggagggccttgagcgtgctccggggctgagggggcctgcgggcgctcctggcctgcgggctggggtgctccttccggctcctgcttgccaacctctttcctgagctgtgcgtagcatcccatgtgcagcctcagctttyagactggcctccagcccctctgagctgtttttctgagcctcgggctctcagcctgttttcaccgtcctctagaaaggctggggaagctcttgtggagacttaagctcccgttagtgtgcatttgggtctcttttttttttttttggcagggtagtgtttgtaggaatcattgctgatactgttatttatagcatataaatttaatagtatttttacgtgtagctgtttatgttgcacctaacaagtaaaaacatttytaaaagtttggggtactgaaaaagtattaaatatgtggcattaatcggtacaaaatgataattctttaacaattctgtaattttctctcaaagttataagaaaataacattataaaattgcagaactaaagtttcataaagtcaaaagttcgttgatgttggttattctgttgaataaaatataggaagaccagctgaattttgttttcttttaaggtttttttttttgtggggttttctttttttttttttttttgagaaggagtcttgttctgtctcctaggctggagtgcagtggcgccatctcagctcactgtaacctctggctcccgtgttcaagcaattctctgcttcagcctcccaagtagctgggattacaggcgcccgccatcactgtctggctaatttttgtatttttagtagagatggggtttcaccatcttggccaggctgatsttgaactcctgacctcgtgatccacccgtctcggccacccaaagtgctgggattacaggcgtgagccaccacgccctgccccttgtaagttttataaggcactttttacttgtgttccaagttcaagtgtcccagtactcatttatttctagcaggaggaagaacaaaacttgtgtcatgttttgtgacataattatatccagaataacttttcttttttttttttttgagacggagttttgctcttgtyccccaggctggagtacaatggygcgatctcggctcactgcaacctctgcctcccaggttgaagcgattctcttgccttagcctcccaagtagctgggattacaggcgcccacaccatgcctgagtaatttttttttttttgtatttttagtagagacagggtttgaccatgttggccaggcttgtgtcaaactcctgacctcaggtgatcctcgcgcctcagcctcccaaagtgctgggattgcaggcgtgagccatcgtgcctggccaagaataacatttaattcacagcaaaataactttgtggctttggaggagctgcaaaggaactacataggctttggctgtttgtgtaaccatataggattcttgccctatgagcagcaagtcaatacacggaaacaacggggattgcagcagataaagtgttttacttgcagggccaccgaactaggagactgaggaaacttcaagtcagcctccccaaagagttaaggtctagaggttttttttttgcttttggttttttttttgagacagagtcttgctctgttgcccaggctggagtacaatggcatgatctcggctcactgcaacctccgcctcctgggttcacgccattctcctgcctcagcctcccgagtagctgggactacaggtgcccgccaccaagtccagctaattttttgtatttttagtagagatggagtttcaccatgttagccaggatggtctcgatctcctgacctagtgatccgcctgctttggcctcccacagtgctgggattataggcgtgagccaccgcacccggtccagaggttttaaagagagggtagtgggttaaggtattgattggtcagagaatgaaggatgaagtcataggacagagagataaaccacattctcatgctaatgtggttccttgatggggtcttaagactagcttgcatcatctcaaaagtcttaggctcctaacattaaaaatgctgtctataggaacatggtatatataaacaggtacaggaaagtggatcgaaggacaatctaattatgcttatctgtacttttgtctaaagcctggctgctacctaaccttgtgatgaaggctttaacagttcatccacatttttttagtaataaactgtactgtaatagattaataattagattaattagatgtaataattaattaaaacctagtacccttaaatctgcaagcataactgttccatggctagagttattcatgcctcggttctttgggtttcgaccaataattgaaattgattgtagttatatatttaggtgggattgggggtgtcacagctacttaagacatttgaaaacctatgtcttttgtagattggtcagctgaaagcagttcaacctctgatgaattagagtaatgtgtggttttttattgttttattccaatatgacaatgatcccttagatgtacttttcaaatgaggttctggcatctaaccagaaatgaccttaaatgttgaaaagccatgtagttatgggaccatagaatacaacttgtctaaatacttcatatataaagtatggaaaaattagcgtatagtagtgggaaacacgggataggtggtgcgggacataagtacttgttgcatctcagtggtttcctatagtggtaactgtcagtctgtgactaaaatgtgataattgcaactgtctgaatcagatctagaatgcccttttatgttatgaccaacttatatacttaccrgtctgatataattacttgacacscatgtaaggattaatgacttgtgtgtttatggtatttttattctagttttgagtctggaagctgaccagaatgtgtttgaattcatacagaaataatgttgatatttggaacccatgtcgaacttctatgaagaaaggacaacgatgattgcagccagggatttgcaggaatttgttccttttggtggagaccactgcaagcaccaccctaatgctttgaaccttcaacttcgccagctgcagccagcttctgaattatggtcttctratggtgctgctggcttggtgggatcccttcaggaggttacaatccacgagaaacagaaggttccattgagtttcccattgtgtttttgaaatgtagagtgatataatctacttgtaatttaaggctactaagatgcaactgagagatcggtgtgatgccacttctagagtagagttaaggtgtggtaatttcaataaatgttgaaaataatgactttattacattgtcatagcgacttatttagataccctctataacttgtggttttatttattttttatttttcaatttttttgtttgagatgaagttttgctctttttgcccgggctggagtgcactggtgcgatcttggctcaccgcaacctctgcctcccgggttcaagtgattctcctgcttcagcctcccgagtagctgggattacaggcatgcaccaccacccctactaattttgtatttttagtagtgatggggtttctccatgttggtcaggctgatcttgaactccggacctcaggtgatccacccgcctcggcctcccaaagtgctgcgtttacaggcgtgagccactgtgcccggccaacttgtggtgttataatgtgagtcaggttcagtagtatgattgttgtccattttaaacctttttcttttcacttaatatgtggggaccagatttcatgttatytaatgattaaatggtagagattagaagtagtccctgctgcagaagatttacatgtttctagaggagagaagaaatgccacaaaagtaggtagagtaatagctttttttttttcctgagacggagtttcacttttgttgcccaggctggagtgcaatggcacaatctcagctcaccgcaacctctgcctcctggattcaagygattctcctgcctcagcctcccgagtagctgagattacaggcatgtgccaccacgcccagctaattttgtatttttttagtagaggcgggatttctccatgttggtcaggctagtctcaaactccagacctcaggtgatccacctgccacggcttcccaaagtgctgggattacaggcgtgagccaccacacccggcgagtaatagttcttaagtagaggaatgagatgttaagtgtgtgtcagaaaatgaatccctcctgccttattccattgtcatatccctttgggatactaaaatctcggggagggaaagcctatgtagttacaaatggaaacttctctttcttccattcattttggtgggtgggacaaaggaaaagaaggtgaatatatatgtgattgcgaagcaggaagtctgcatttgtgtgtgaactccccaagtgattcccacgtgcacctcactgtcctttccctaccctacctcatatacttaatatgtccttttagtctcccaagcatgtgatttgacttttggaactatagagaaggtgtactttttgttcgtttttgtttttggcagagtaatatagaggaataatatgaaacattcaatatagagaattattgagtaaattcttcatgtaattctgtagtgtaatgcatatatccacatcctcygttaatcagtgtaccaaactttgtaggagttgtgtttgaattgagtcttactccatgggcaaataaattttgttccagatttttgaagaacaaaaaaagagtgcttgaatatgttttacatgtgttaatttttaaggaaagctggcagttaaggaaaggagtaagtgaaattggagaagatgtggactatgatgaggaactctatgttgctggaaatatggtgatatggagcaaaggaagtaaaagccaggcattggcagtttataaagcatttacagttgacagtcctgttcagcaggtgagttgatttgaattttagcatttgattcactatttaatgcaattaaaaaaaagttttgttttaaaatttaacagaaatgataaaaccagcctaatgatctcagcagctgggtgtacgttgtaacatgacataatrtaatgtgaagataatggcaggaaaataaaaatttaattttatttttatatcatcactttttttacactcttctttgtcactttaatggtaatctttaaacactctgtccttatgtaattcaatttgttattgccagcaaaaacctataaaacatgaagagtacagaaatattttaacacatgattactataattgattgcaaagatttgaataaataaaaatcgtgggattcataatggtagagagaaaggaaaaaatctgctttgcagccattgcagttggctgttataactaactgttctgaaagttgataatgaaagggaaagaattaagcatttgccatattttttcaggaagacatgcagttcatctccatttgatgaaggaaaacttgtacttagagaagaatgctagctaataagtgtaaaaggaattgtagaattagaatatcaccattttgtaacctccagtgcaataattgattccaacaaggattgtaaatggatactaacactgttggttgaaagaatattaccatggcaccaacacatcaccctgtggattacctggtaaatgtgaaggaacaaatgtacctctactttggagttatttgtcagtctccacctcaatcaagtgattgagtttagcataattagtagtgacatgaaggagtattatgtgcttctagctataatacagaatgaagtacatgatgtcatctaagttttcttcccaaaaatatgaatatttagacctaacttcctatttataggaaatataggcaatagagaattatattttaaaataccatgagataaggaaatagatagctaggaatggctaaagctttattattattattattgtttatttatttatttgttttttgagatggagtcttgctctgtcacccaggctggagtgcagtggcatgatctcagctcactgcaagctctgcctcccaggttcatgccattctcccgcytcaccctcccgagtagctgggactgcagttgcccgccaccacacccggctaattttgtttttatatttttagtagagctggggtttcactgtgttagccaggatggtctcgatctcctgaccttgtgatctacccacccacctcggcctcccaaagtgctgggattacaggcgtgagccatcatgcccagccaagcttgataattattaaaactggctgatggggattcattatcctattctgtttactttgtatttatttgaaattttccattataaaaagtttatagtctacattctggtttctttaaaaaagtcacggagaaagaaaaaaaggtggggactgttctacattgaaagagactaaagagacatcaccaaatgcagtattttttgatccttgttaaatgaactttgattgagtcctggttttctagctaaaaagatatttttggggaaaatttgggaaagttgaaaattactggccagtagctgatgttagagaagtattatttttttctcagggacgatgattttatggttttataggagaacatctttatttttagaaaaggcatggtgaagtatttaggggtgaaatgtcatgatgtgtgtgcaatttatttttaaacagtcagcattcccattccraaaatcccatatgtacacaaatgcacacacacaaacaaatatggcaaaattttcatgattgttggatataggtgaaatatgtttgctgcattatttcaacttttcttactgaaaatttttataacaaaaagttggaggaagaactaatgcatttattgtagttgaattagggttgacgaggttttggaggctttgactaatgttaagtttmatttttgtaaatgctgaaatctttgtatctggatactgcttcctcccactcctcccgcctaccrttaactatttcctgatgagtactgtattctatttattggaaaggataaactgaatcattattccaacatttgagggcatatgtgaaagcatttgtgtcctggagtgttgaagccagtgatctttttgatggtaaattttttcccatataattcatatagttagtatagatgtgaaaagtgcatttgatgatatccaagtagttctttgcttctatatcttcatcttaatttctccaagaacagttgcctatttactagattctatggaagtgcagttagatatattatctcctttatcttaagatcacttgtaagtgtaattgtaagatttggaatttcagtcttttgatctggaaaatatattgttacttaatcttcttgctaatatggagaaagataattttctattttgtttatgaaataatatcaggtatatgtgactcagattttatctgttcattgttttacctatcctgcaagtattttttttttggttgttctttttattttttcatttattctttttgttttttaatagagatgggggtctcactatgttgtccaggctggtcttgaacccctgggctctagtgatcctcctggcttggcctcctaaagtgttgagattacaggcgtgagccactgtgcctggtcttctgcaagtatttagtctcactctgtttcagacattatgctggggctacaaaggtgaatgtagtttctgccattgaaggactcatagcctagaaaggagaacaaacagatcamctgaaatgmtgtattctgaatgctgtataataactacctgtccacagagtgatgagagcccaaaggactgagtgccaaagggagggtttttcaaagaagatgctatttgtgttataaaatggtggcagaagggcattctaggcagaggaaatcacagcaaaaagarttatggaaaaagatgactttttaaacttcagaatggctgtacacgaagtgtgggtgtggagagatgcaagtggatgctggcagtatacagaccaaagggccttgtatataaaccaaggaatttggattttaaactgtgtgctgaagggagcctgccaaggattttaaaatggaagcgatcaattttgtgttttgagaagagattgctttgttagcaatatatatataggattgactggagaggagggagactgttgtcaggggcactattttgtgactgttcaggtaaaagattggtgccttggcaaagaaggggtgataaagcagagggagatgtggaaggggttagtgatctcttagrtatcagggataaaagagatgttaaaatatttacttttagaggctgagaggatgggatttcatsaaaggaagttgagactgtaatcggtgcattgtagattttggacgtttcaggttggagcacagctctcatgcatggttttcttcatgaattttcatttcttaaccattaaaatctcccacaactcagcaataaaacaaactacccaattaaaaaattgggcagaaggacttaaatggacatttttctaaagatgcacacatggtcartaagcacatgaaaagatgctcagcttcgctaatcattaggcaaatgcaaattacaaccacaatgagataccactttactaggttggctgttattaaagaaacataacaaatgttggtgaggatgtccagaaattggaactcctgtgcattgctgatgggaatgtaacatagctgctgtggaaaagtttggcgatttctcaaaaagttacacrtgtagccaggcatggtggtgcatgcctgtactcccaagctgttcaggagactgaggcaggggggtcatgtgaacccaggagttctaggctgctgcgagctagaatcatgccttgcattgcagtttgggtgacagagtgagaccccatctcttgaaagaaaagttatacttagaattaccattatgatccagcagttccagttctaggtatatgcacaattgaattgagaacagggattcacagatacttgtacaccagtgttttcagcagcattatttatgatagccaaaaggtagaaacaacccatgtccattgacagatgaatggataaacaaatgtggtatatgctaacagtggaatattgtttagctttaaaaagggataaaattctgatacatgtcataacatggatgaaccttgaaaacattatgttaagtgaaataaaatagatataaaaggacaaatgtacagtttcacttacatgagatacctagcacaggccctttcatagggaaagtggaatagaggttaccagagctcagggcattgggaaatggggagtattgtttaatgggcacggagtttctgtttgagatgaggaaaaagttctggaaatgtgcagtattgtacaagctcacaaattgtactaagctcgtcaatttaatgttaatgctactgaattgtctacttaaaaattgttaaaatgttaattttcatattgtgtgtatttgaccacagtttaaaaaaaaacacaaaatgctgttaaataataagtgattgccaggtatgtcagttaaagtttaatagcttttcctagtttatattttgtaagatgggcttttaagaaagggaggagttagtttttctaaagactttttcaaaagtcagtctagagagagtctaagatcagttgtttaatctggagattataaagtttgaataatctttagttttgtagaggatatagggtttagtatggtttgagctactatttgaatttttgctgcaaagtttctatctggtagattttttgattcttgtcttctctttttgtaaaatttatttttttaatttaaaattttaattcctatggatcttttcataaaatttaattgtaaacatattttgcctttccttatcatatttatcatttattactctaatttattttttcttattctttttgttcccatgattgtacatgttgagctgaggaggcaaagttattaygtagatgctattattattatttagatgccattagttaatagatgattatttagatataattttcttaggtaagcattttgttttgattttaggcaytgtggtgtgacttcattatatcacaggataagtctgaaaaggcctacagtaagtttctttttgaaattttatttttcttatgatgattccaaatatttatctcattgtatttttcattcaaatgaagtagccactagtaatagtggtttaccataagcatctttatattgtgcattaaataatttgtgctgttaggattgaactcctttgagggaaaaaacayataagtcttgttgtaccctttcttttcaggtagcaatgaagtagaaaaatgcatatgtatattgcaaagctcatgtattaacatgcatagcatagaaggaaaggattacatagcttcattaccatttcaggtaaacaagtgtttcaaattttgggggggttttgttggagaacatttttgaattaattggttttagaggcatgtcttatgtctcatgtttcgtagtagtcaaaaatgttatttttactcaaaataactaaattttggcagctttagtggcttaccatttttctgtacttcacaagaaaataagttatttagtgaagtaaattaggaagtcttctgtggtatgtgtttgttggtttaaatgatacgtaagaacttttggttatattaaataaggcatatgaataacaccagtctttttttgttactcatcgtctttttaatgcctagggctattgttaacacattgtcattttgttactgatcctggccagtggcaggaatttcacattgaacaactcctctttattagatttgattttatcttagagttgcttatttgtattactttttaagaaaataccgtatttaatgattatgttactttgtaaagctattactaaattggaaaataaaacattctgtaatgtttctttaaaacattttataaaggggtaggttctcttacttctatcttttcccacccttttacctgaaaggttgcaaatgtttggcccactaaatatggattgytgtttgaacgaagcgcttcttcacatgaagtacctccaggttcacccaggtattcattttattcacttcagaatattactgcttgggatttgtgtgtktgtgttggttctgaggtttatctaaaagtytgagatgatgataattttcatgytgacagcatagatatatgccattttctctcatctcagtacaagttgagtatccctgatccaaaaayctgaaattctccaaaatctgcaacttgttgagctccagcatgacactcaaaggtaaatgcttattggagcatttcaggttttggattctcawattagggttgctgtcatcaaaaagatatgtcatgatcaartgggttttgtctcagggatgcagggatggtttaacatacacaagtcaataaatgtgacacatcacataaacaattaaaaaccatatgatcatctcaatagatgcagaaaaaagcattggataaaattcagcatcccttgatgataaaaacaaactaggcatagaagggacttaccacaaattaataaaagtcatatacaacaaacccacagccaacatcatactgaatggggaaaagttgaaagcattccccctgagaactggaagaagactaagatgcctactttcacyatttctattcagcatagtactggaagttctggccagagcaatsaggcaagtgaaagaaataaaggacatccagatttgaaaagaggaagtcatactatcactatttgctgataatatgattatatacctagaaaaccctatagactcctccaaaagacccctagatttgataaataaattcagtaaagtctcagattacaaaatcaatgtacacagatcaatagcaccgctatacagcaacaatgacaaagctgaaaatcaaatcaagaacgcagtctctttttttttgagacggagttttgctcttgttgcccagtctggagtgcagtggcatgatctcggctcaccacaacctctgcctcccaggttcaagcgattctcctgcttcagcctcctgagtaactgggattacaggcatgcaccaccacgcctggctaattttttgtatttttagtagagatggggtttctccatgttagtcatgctggtctcgaactcccgacctcaggtgatccacccaccttggcctcccaaagtgctgggattataggcatgagccaccgcacctggccaaaaattcaatcccttttataagagcagcaaagagccaaaaacaaaaacctatgaatatgcttaaccaaggaggtgaatcatctctataaggagaactacaaaacactgctgaaagaaatcacagatgacacaaacaaatggtaacacatcccatgatcatggatttgaagaatccatattgtgaaaatgatcatcctgccaaaagcaatctatagatttcaccataattctcatcaaaataagatctttttttttatagagttagaaaaaacaattctaaaattcatgtggaaccaaaagagcccaaaatagccaaaacaatcctaagcaaaaagaacaagtatgtagccatcacatattctacaaggttataattagcaaaacagcatggtactggtataaaagtaggcacatagaccaatggaacagaatagggaaaccagaaataaagccaaatacttgtaatcaagtatttgatctttgacaaacaagcttacaaaaacataaattgggggaaaggcatcctatttagtaaatggtgctgggaaaactgataccttttttagaagaatgaaattgggttttttttatctctcaccttatacaaaagtcagttcaagagggatgaaaggctttaagccctgaaaccataaaaattctagaagatcaccttggaaaaactcttctggacattggcctaggcaaggaatttatgactaaaacaccagaagcaaatgcaacaaaaacaataaataaatgggacctaattaaaataaaaagcttctgcacagcaaaagaaatgtcagaatagacagatagttcacacagtgggagaaaatatttgcaaactatgcatccaacaaagcactagtatccagaatatataaggaactcagatcagcaagacagaagctcaaaaagtgggtaaaggacatgaatagacagttctcaaaagaagatacacaaatggccaacaaacatgaaactgctcaatatcactaatgatcagagaaacacaaattaaaaccacagtgagatctcaccttactctttaaggaatggccattattaaagagtcagaaaaacaatagatgttggcatggatgtggtggaaggggaatgcttatacactgctggtgggaacataattagtatgacatctatggaaaacagtatggagattccttaaagaactaaaagtacgtctaccattcaatctagcagtcccattactgggtatctacccaaaggaaataaaagtcattatgtgaaaaagatacatgcacatgtatgtttattgcaacacaattcacaattgcaaagataaggaagcagcctaagtgcccattgaccaatgagtgaataaagaaaatgtatatatacaccatggartactaatcagccataacgaggaaatgaaataatgtcttttgcagcaagctggatggaactggaggccatgattctaagtgaagtaacccaggaatggaaaaccaaatactgcatgttctcacttccaagtgagagctaagcaaggagtatgcagaggctatatacagagtgttatgatggactttggagactcagaaggaggagggtgggaagaaggtgtgggataaacaaactacatattgcatacaacatacactacacaggtgacaggtgcactaaaatctcagaattcaccactacataattctgtgtcaccaaaagccacttgtacccccaaaagaattagggttgctcaaccgttagtgtaaggtaaataatccaaaacacttagggtcccaagtatttcagataagggatactcagcctgtaygtacactcatgaactctacgcacttggcacttaattagccttttttcccaatctaagtggtaaaattgaatatgcaaataaatggcttcaaaaaagatttggccgggcgcggtggcccacgyctgtaatcccagcacttttgggaggccgaggcgagtggatcacctgaggtcaggagttcgagaccagcctgcccaacgtggcgaaaccctgtctctactaaaaatacaaaaaattagccaagcgtggtggcaggtgcctgtaatcccagctactcgggaggctgaggcaggagaatcacttgaacctgggagacggaggktgcagtgagccgagatcacatcactgcactccagctgggcratgagcaaaactccgtgtcaaaaaaaaaataaataacaagattcagttcttagctctgccattttctcattgtgctgctttgagcagatcattagagctttcttagctatagtttccttacgcgttacaggaatgttatcatttacctcttaggacttatgcaaagttaaagtagctaaatgtatataagctttgacacagggcctagtaggtattaagtaygcaataaatggcagatgtttactagcggcgtgtttatcttgccccctatgaattatgagcacaccgaagggcagcagcatacagcacctgtcaggcatgttgtggtgcaagaggtaggcacttgctaagtcttaaagaaattgctgatagattttcatctctttatgctttgaaagaaagcccgtcttcgctctaaaaaaaataattccttaaaaaatgtaggcttctggccaggtgtggtggctcacgcctgtaatcccagcactctgggaggccgaggcaggtggatcacctgaggtcaggagttcaagaccagcctggccaacatggtgaaaccccgtctctactaaaaatacaaaaaaactagctgggcgtggtggcgtgtgcctgtaatcccaactactcgggaggttgatacaggagaatcgcttgaacgtgggaggtrgaggttgtagtgagccgagatgatgcccctgcactctagcctgggcaacagagtgagactccatctcagaaaaaaaaagcagacttaatttacttgaagtagtttgtttcttccttttttaaaaaatrcattcctttgtcagcagatatgggagaataaatttctttcttagctgccaaagacacactgccagtaagagaggtcaataaaaaaagaccgctttatgcacattactccatttgttctgtactgtgatgactgctgtttgcagaaattccctggctatattgatttccctctgttcgtgcattgatagaattactctaaggggagagatttctaggaatgaaatagaagacaatgtgaaaaatagtatgtacaaagtttagaagattgcattttgagatagtaggtttctagttgctcatgtaatctggagatttcttttcaatagaagtgcaaaatttgtgcacagacatactcgtattggtaattaattgattatttgtttattgctagagaacctttacctactatgttcagcatgctgcacccactagatgaaataactccacttgtttgtaaatctggaagtaagtgtatttctatattcttttrgataagctcttttttttttgactttggtgagggaggttataaaggcgcttatatgaaaactgacttataaaaataatgtaaacattttacaaaaataacttctattttgactttcttgaatatcatggtattaactgctcaacagttattttagtaaaaataaggcatataaatcagtgaggaataccgatatatttattaacctacctgtagatgctttgttctttaataattaataagtaaatgaatgatacttagatgaagtaaagtttattttttgttgttgttttgggttttttttttttttgagaggggtcttgctctgtggcccaggctggagtgcagtggtgtgatctcagttcactgtaacctctgcctcccgagttcaagtgattatcctgcctcagcctcccgagtagctgggattacaggcacacgccaccatgcctggctaattttttatatttttggtggagatggggtttcatcatgttagccaggctggtatcgaactcctgacttcaggtgatccacccacctcggcctcccaaagttctgagattrmaggggtgagccaccgtgcctagctgctttttatcttctgtattatgtcttggcaaactgtaggccatgggctaaatctggcctgcagcatgtttttgtaaagcttgtgagctaagaatggtttttttttttctttcttttttaagacagagttttgctcttgttgcccaggccagaatacaatggtgcgatctcggctcactgcaacctccgcctcctgggttcaagcgattatcttgcttcagcctcccaagtagctgggattacaggcatgtgccaccacactcagctaattttgtatttttagtagagacgtagtttcaccatgttggtcaggctggtcttgaactcctgacctcaggtgatccacccacctcggcctcccaaagtgctgggattacatcgtgagccaccgcacccaacataagaatggtttttaccttttaaagggttgtaggaaataacaaagattatgtgatagagtcagtatgtggacagcaaactgccctatttagtctttgatcttttacagaaaaagttcaaattttatgttgttactaattgcagacaacccaaataaacatactagagcctgggattaaatggcacgcagccttttttttttttttttttaagtacaatttccattttattttttctctggagaatagtctgtttttagtcgttttattttcattttttttttttttgagacggagtctcgctttgttacccaggctgcagtgcaatggcacgatctcggctcactgcagcctctgcctcccaggttcaagcgattctcctgtctcagcctccctagtagctgggattaggggtgtgccatcacgcccagctaattttttgtattttagtagagatggggtttcaccctgttgcccaggctgatctcgaactcctgagctcaggcaatccacccacctcggcctcccaaagtgctaggattacagacatgagccaccacgcctggccttgtcttcagtgttgaaggactcagctccttacatgggctttggtgggtgtgtttggtccttgtgggctttacaaggtggattcctgacgacttttctgtgaattgcacatctcacacagtaatttagcttcacatacagcttgggaagcacataggcattgaagacactcgcttcacaaatgtccctgactgctgcggcctccaccacatttcgaatgatgaattttttttttttttttgagacagagtctcgctctgttgcccaggctggagtgcagtggcgggatctgggctcactgcaagctccaccttccaggttcacatcattctcctccctcagcctcccgagtagctgggactacaggggcccgccaccatgacccgctaattttttttattttagtagagacggggtttcactgtgttagtcaggatggtctcgatctcctgacctcgtgagccgcctgactcagcctcccaaagtgctgggattacaggcgttagccacctgcccagcctcgaatgatgaaatttcttaatggccttgtccttgggcacacgtcgggcacagtttgtgcaacgaataggctgcatgtggctgtgcccctttttggcatgattgttgttccttcttttctttgtcatcttggaggcacggactggagggaggagtgtagccattattgatcatatttttgactaatatttagtgaactagaagttgcttatttgtgatgtcaagtaggatacaaataacacagtatgattataattttgtaaaaatgtataaagtgtgtatatatgtatgaaaaaaaccaaaaattctctaatgtattaatagtagatattttgagatggtggcatgatttttatttataaagtatttcttatgattatagaatcatattttaaaatttttcagtattttaactgagtgggaaacatttcctgtcaaataaggatatggagaccagtccatggtactttagattaaaagctgaactcactgggaaaaaccttattttgcatgtgtaactagtaaagcagaaacaacagtgtactgtttggcactgtctgaatagtaattatagagtacagctttcatacagaaaaacagaaccaataaggaagtcaaacttggcagaatagttgagtgcaatttataaataagtcagttgaagaaatcatcgaccttttacctgtggctgattcgtgtaatggnnnnnnnnnnnnnnnnnnnnnnnnnnnnnnnnnnnnnnnnnnnnnnnnnnnnnnnnnnnnnnnnnnnnnnnnnnnnnnnnnnnnnnnnnnnnnnnnnnnnnnnnnnnnnnnnnnnnnnnnnnnnnnnnnnnnnnnntgagagtcagcacaaatgttaacatttagcaacagcatgtatgtgaagctaaaacttgtaatgctctcatctttaatgtattttaaggaagttgatgcctaaagtaaatttattaaaaattcagagttaattatttaagatagtaataaattttgtgctctctttggcttggttgttctttatctttaacaattttaagagctctgttcataaatatcagtcttgtaaagcccattgttctatacctgatttttctattttatttttaaggtctttttggttcatcacgggtgcaatatgttgtagatcatgcaatgaaaattgttttcctcaatactgacccctctattgtaatgacttatgatgctgttcaaaatgtgcattctgtgtggactctccggagagtcaaatcagaggtaaggagaaaggcaagtcacttctccttaataggaaagggtaggctgggtgcactggctcacacctgtaatcctagcattttgggaggccaaggcaggcggatcacttgaggtcaggacgttcaagaccagcctggccaacatggtgaaaccccatctataccaaaaatataaaaaattagccaggtgtggtggcttctgtaatcctatctactcgggaggctgaggcaggagaatcacttgaacctgggaggtgtaggttgccgtgagccaagatcatgccactgcactccagcctgggtcacagaatgagactccatctcaaaaaaaaaaaaaaaaaaaaagtatatatatatatatatgaaagagtagttaatacttcataccctcactttttttttttttttttggaaaaatcacttgtgaatagttttattatcatcatcatcatcatcatcatcatcatcatcatcatcatcatctctagagacagggcctcactctgtcacccaggctgaagtataatggcacaattacagttcactgcagccttgaactcctgggctcaagtgatcctcctgcctcagccttccgagtagctaggactacaagtgtgtaccaccactcccagctaatttttaattttttgtagagatgggatcttgctatgttgcccaggctggtcttgaattccttggctcaagctatcctctcgcctcaccctcccaaagtgctgggattatagatgtaagccacggcacctggcctcatttgagaaatagattgagcttcttaggaaagaagaaatactgtgtctttagtaactgacttcaacttgcattcttacaaggaaattgctattttattctaattattgtttttttttcctctttctctttattttgacttaaggaagagaatgttgttttaaagttctctgaacaggggggaaccccacagaatgtggccactagcagctccctcacagcacatctcagaagcctctccaaaggagattcccctgtgatttcacctttccggaattactcctccattcacagccagagtcgctcaacctcatcacccagtctacattctcgctcaccttctatttccaacatggcagctctaaggtataagggtttcctggtttttctttctaagctttctgttttgttttgaaggatttagaattgctgttgacagctgtttttaggggaaatatatttaggggagatgttttttaggggaaatagccattatcccaattgagcctttttttttttttttttttttttgagacggagtcttgctgtgtcacccaggctggtgtgcagtggcgcaatcttggctcactgcaaactctgcctcccgggttcatgccattctcctgcctcagcctccagctgggactacaggcgcctgccaccacgcctggctaagttttttttttttttgtatttttagtagagatggggtttcaccgtgttagccaggatggtctcgatctcctgaccttgtgatccgcccacctcggcctcccaaagtgtggggattacaggcgtgagccaccgtgctcagccctgagccacttttactaagatttctaagtttaccatgtcacattctttcctgagtcatattttgaagctgcctatgcttgtcctaaggttagttgcctcatttctaccactatgtgggcaacagtttgatgaatattaattcccaaaatactgtggcactattttatttttgccttaatttatgttagtttttctttttttttacttgttatttgatatgtaaatgtatctatttctctatatagatatatatttaaatcaccagatatgtatatctggtgctacagggacattgttttgttgatatatatatgtctgactatacagggacatagtttagagctttttgaataatcattcattttccgaaaaagaagatgatctaagttttagttgtaaaagatgagttcttctaataataattctaaatctttagaatatagtaaagcacattgacatgaaccatttaaatagctactcctttttgaaaaattttaatttctgacctggattatgccatgaatgctcttctgtctgtggaattttgggaagtgtcattggagtgtgtgtcatataagcctgccctgctaactgtgatgtactctctcctctgtttattttgcagtcgtgctcattctcctgcgttaggagtgcactctttttcaggggtgcaaaggttcaacatttcaagccataatcagtctccaaagagacatagtatttctcattctccaaatagtaaktctaatggctyctttcttgcaccagaaacggagccaattgttcctgaactgtgtattgaccatttgtggacagaaacgattactaatataaggtttgttatatatattattatattcaaagaaaaatgttgctgaaagtcttgggaaatatatggcattttgtttaaagtttccttttaatgtgatcagttattaatatatgtaaaaatatatagagatatgtattaaggccacctcagtttcagtagaggatattaatgakattaaagtgatcataggctggacgtggtggttcatgcctgtaatcccagcactttgggaggctgaagctggtagatcacttgagcctaggagttcgagaccagcctggccaacattgtgaaaccctgtctctactaaaaatacaaaaattaactgggtgtggtggtgcatacttgtaatcccagctactcaggtggctgaggcagaattgcttgaacccaggaggctgagcttgcagtgagctgagatcgtgccactgcactccagcctgggtgacagagtgagactatctcaaaaaaaaaaagtcatcataaaaatattattttgtcatctgatatttcttcctttatagtaataatctctcatttttcgggtgttttttgttctggggagaaacagttaatttccatccgtgaggaaatgtggggttttagcacgtttcctaagttttatgttcatgttagttgagtgccagctttactttttgggaaacatagcttagatctctgttctgggtgacctttcttcttttatattctctttaataattcacgtgttaatttatatgccaatgtgtgtgctagttaacagtctaataagtcactgtccctgtcctcaaaagaggcagatagctgaaggatggtgacacaggagggactacttttgctggtagggctttgaaagacgaataggtattcgctaggcagggaagttgagaaagaccacagayggcagctgggatcagaacaaaagttctggtgagtgcgtggtgtatttagggaattacaagtactyccactctggtttttgcagaggggagggaaaaggctaatgaagaggaggcttcctaggygcagtggctcacacctgtaatcactcactttgggaggctgaggcagatggatcacttgagctcaggagttcaagaccaacctgcccaaaatggtgaaaccccatgtctactacaaatacaaaaattagccaggcatgatggcgtgcatctgtagtcccagctactctggaggctgaggtgagagagtcatttgaacctgggagttggaggttgcagtgagccaagagcacactactgcactccagcttgggyracagagtgagactgtctgaaaaagaaaaaaaggaggcttgagagattactgattgccctttaggcctctggtatgtttgatgacagcggtaagaaggcactttataagtgtgtyggaagtttgggaaagagcagaacaataaatgtggaattgtcagcttatargtggtgattgaggtaagagaattagattagaattgaagaawtattgtattcaataattgtgtgtacatgtagyatatargccttytcccaaggagagggttttaacattccttagattctcaaagggatttgtggcctccaaatagttaaaatccagtggtgtagaatkagaagagggctaggaactgaagtcctggaaacttaagatttggggaatggaaagagacaaagctggcacagagagacaaagcaaaagaggtcagatgggagaagcagcaggaaatacagaatacaaaaaagaacatttcaagaatacagagatgccagtattgccaggtactggtgaagtgtggccctgagagttgaacccagagaggaggtacctgggtggcagtgggttccttggtgaccttggccagagcattttaagctgggagggtggcgggggaaagtggggtagaaaaagtaaatggggactgaggaaatgaacataggcatacagactctttaaggagtttgcctttgaataggaatgaagatacaaaattagagggagtcttggtcaaggagagttttgtttttgctgaactataataaaattagttttcatgacatcttgccccagtattttctttttctttttttttgaaacagggtctcactctgtcacccaggttggagtacagtgagtgactcaatcacagctcactgcagccttggccttctgggctcaggtgattccccaacctcagcctcccagatagctgggactataagcacacaccgccacgcctgactaattttttgtaatttttgcagagaaaggattttgccgtgatgcccaggctggtctcaaactcctgggctcaagcaacctgcttgcctctgcctcccaaagtaatgggattacaggtgtgagccactgtgcctggcccccagtattttctaacctaaccacaatacaagttttatatccagtcgaattgagaaggtcttttatatactctaatgttgagtccattttgtattttaagacttttaatgtgaagtagtaggctatacggactatactcaagggaaagtattgaaaatacagaacagaggaaatgattgatggaacaagtaaccagaaaggtgcataagtggtgagattgggataaagaagtgaaggttgatcagatatgtaaggcaggaggttgagctcaagccttagagcctcgttttatctgaaatggaaggcaaatgcataatcttagagagaatgaaatggggaataggtagtctgaagaaagtaaagatgtggatacaatgttgaagtagtctgtctggtttgtttctcatatatcaaaagtatcctacaattataaatcatttttctttaaataacttatttgtaagttgaatatattatagattcttattttttagatttatgggtcttctgtagcactatttatttatttatttatttatttattgagatagagtttcgctcttgttgcccgggctggagtgcaatggcgtgatcttggctcaccgcaacctctgcctcccaggttcaatcgattatcctgcctcagcctcccgagtagctgggattacaggattactggctaattttgtatttttagtagagacggggtttctccatgttggtcaggctggtcttgaactcctgacctcaggtgatctgcccacctcggcctcccaaagtgctgggattacaggcgtgagccaccacacccggccttctgtagcactttagaaggaagggtttgggaattagagatacgatttcaaaaagagatgtgaatgaggcctaatctgagaaggagagggggtagataggagaaatagcattatgaaagatctggccctttgcgggataggaattcaagtttgcatgcattactttacaagtaggtggcttagtttgcattactttacaagtagggagcttacatagtatgtaatttaaaagttcatcagtaattgttaaatttattgtagctttccccaacaaagctgtgtaacgagctcataatcaaagaactgaaaggatcttagagatcatgaagtttaattcttagaaatgtttgtgtctttgagattattgcttgacctaagtagtttttagatttcttgcagaatattttcaaagactttttttttttttttttttctttttgagacggagtctggctctgtcgcccaggctggagtgcagtggcgtgatcttggcttactgcaagccccgcctcctgggttcatgccattctcccgcctcagcctccagagtagctgcgaccacaggcgcctgccatcatgcctggctaatttattttgtatttttagtagagacgggatttcaccgtgttagccaggatagtctggatctcctgacctcgtgatctgcccgcctcggcctcccaaagtgttgggattacaggtgtgagccaccgcgcccggcctcaaagacttttaatagttactgtggtagattcttggaccagtgctgacagttactttattaatgtatctattatagagagaaaaattcacaagcctcaaaagtgtttattacatctgacctatgtgggcaaaagttcctgtgctttttagtagagtcccagctccagttacggtaggtgtatgtctttcccattgtttctgtataaataacttagcactgctttttctttttcttttctttccttttttttttggcttaagtagttttatttagaaataatttacatgtcataaaattaacatgtttttactgtataattaaatgatttttagtaaattacagtgttatacaaccatcaccatgacccarttttacaagatttatatcaccataaaaagatttccttgtgcttgtttgtagtcagtcttgttcccatttccagcctcaggcaaccatgctaggcttctgcctttatagattaatttttctggacatttatatatatataatgtatgtacacacagtgtacctttttgtgtttagctttcacttagcgtgatgtttttaggatccaccattttgtaacatgtatcattatttcatacctattgctatgtaatagtccattgtatagatctaccaccatgttttgcttatctgttcatcagctganggacttttgrtttatttccacctcttgactrctgagaattatgaccatatgaacatttgaacaaaggtcttgagcaaaaatgtggacatatgtgattttatttttcttgagtaaatgcctaggattgrgtcnttgggttgaatggtaaattcatntttaactttttaagaaatcaccaaactgttttycaaatagcctgtatcattttatattcccaccagcaaaatatgaaggttaatgtctctttatccttgacaggattggatatcatcacactctttsattgtagctattttcyagtggttgtgaartggctttaatttgcttttctctaatgcattctgatgttgatcatctcatgaagttattagccattcatttatcttcttaggtaaaatagctattcagatcttttgcccatttatttmccttcatattttgaaatacgatagattaaaggaagttacaaaagagtaaacaagtcctgtgtaccttgcrttctttttccctcacaggtaacctcttrtayaactataatacattatcataaccaggagatagatgatstacacackttatttcaaatttcatcaatttgacatgtactcatttatgtgtatgtatggttctatgcagttttttcacatatgtagatgtgtgtaaataccaccacaatcaagatacaaaacatctttatctgtcttacgttaactccttatagtcacatacaccattrcccactgatsctggtaaccactaattctccatcttgataatttggcrtttgtgaakgttwtataaatggkctcatacagtatgtaaacttctgagattgtctttttctgttcagyataatacttttaatacccatacaggttrttgcatgtatcaagtttcttttttattttattatttagctgtgtaaagtttcaagagagtaatgataaaacccagctcatctttggttcagtgaccaacataccagcaaaggatgcagcaccagtggaggtaatgtaggcacatttgagaagttgacaattacgcttcawcagatttttcagtcaaaaaatctgttaatttgctcagattgggaaataaattttttgtcttttttgtttttttagaaaatagacaccatgctggtcttggaaggcagtggaaacctggtgctatacacaggagtggttcgggtaagcaataagtagcacttcatgcctttagtaggacttcaggctgcctgcatgaatatttgtaatgttactttagattgatattttaaatttgttatgttcctgtctgcacaatttggcagaagaattttgttaataattctcagtgaagcttcctatttaggtgggtcctaatttggagggctatggctcactgctgttaaatgcattggtactctaaacctgtcacagatgggaaaccttcaatgagtataggtagatttttttttttttttaaagttaaagttttgaaattgaagcatgggtacctttggtaagtactaaagttttggtaaagtttcactatattaaatgtggtatatgttagctgtatttttttgagacggagtctcgctctgttgcccagggtggagtgcaatggcacgatctcggcttactgcaagctccgcctcccgggttcacamtattctcctgcctcagcctcccgagtagctgggactataggcgcctgccaccacgcctggctaattttttgtatttttagtagagacggggtttcaccgtgttagccagggtggtctcgatctcctgacctygtgatccacccacctcggcctcctaacgtgctgggattacaggcgtgagccaccgcgcccagccgctagctgtattttttaacatttgtgaaatgtacgtagagaatatacattttacacatttaaattatgaaatttaaatacatacaatttgaataataataatgaagtgaatattcatctacccagtactctggttaagaaatagaatattgccagtatccttatttttattacattcttttgtgattgcatcctatcttcccctgccctcgagatagaatcctgattttgtgataaatcagttgtttgtattactagtttttacagttatgtatgtatcactaaagaatgcattatttagttttccttgtttttgaatttttatataaaaaaagataccatgtactcgcctctgatatacttattttgctcaacattatatttgttttagatttgtctgtgttgatgcgtgtgttgtttactcattcagtgtgatgtatatatttaatagtattccatcgtacctcrttttgtgctttgctttattgtacttcacagatactgcatttttttttacagattgaaggtttgtggcaacttcgtgttgagcaagtctgttggtgccatttttccagcagcatgtgctcattttgtgtcactgtttcaaatattgataattcttgcaatatttcaaacctttttgttattagtttatctgttatggtgacctgtgatcagtggtctttgatgttactattggaattcttttggggcaccacgaactgtacccatataagatgaggaacttaattgataaatgttttgtgtggtctgtctgatcatttgacccctttcctgtctctctgtctcctcctgcctcactatatcctgagacaaaacaatattgaaattagaccaattagtaaccctctaatggcctctragttttcaaatgaagggaagaatcacaggtttctcactttacatcaaaaactagaaatgattaagcttagtgaggaaggcgtgttgaaagctgagataggttgagagccagaccacctgtgcacaagagccaacttgtgcatgcagaggaaaagctctcgaaggaaattaaaagtgctatttcagtgaacatggcaactgataaagcgaaacagccttatygctgatatgaagaaagttttagtgtctggacagaagatcaaaccagccataacattcccttatgctgaagtcgaatccacagcaaggccttaactctcttcaattctgtgacggccaagaaaggtgaagaagctgcagacgaaaagttgtaagctaacagaggttgattcttgaggtttaaggaaaaaagccctccccataacacaraagtgcaaggtgaagcagcatgtgctgatgtagaagctgctaagataattgatgcaggtggctacactaaacagattttcagtgtggatgaaacagctttctgttggaagaagatgccatctaggactttcataacctgagaggagaagtcagtgcctggcttcaaaggacagtctgactctcttgttaggggctaatgcagctggwgacttaaagttgaagcccgtgctcatttaccattccaaaaatcttagggcccttaagaattatgccaagtctgctctgcctgggctctataaatggagtaacaaagactggatgccagcacacctgtttatagcatggtttactgaatgtgttaagcccactgttgagacgtattgctcagaaaaaagattcctttcaaaatattaccgctcattgacagtgcacctggtcatctaagagctctgagggagatgtacaggagatgartgttgttttcatgcctgytgacacatctgttctgcagcctgtgaaggagtaattttgactttaaagtcttactatgaaatacattacttaactggagctgccatagatagtgattcctctgagagatctggcaaagtccactgaaaaccttctgggctgggcgtggcagctcacacctgtaatcctagcactttgggaggccgaggcaggtggatcatgaggtcaggagatcgagaccatcctggctaacacggtgaaaccctgtgtctactaaaagtacaaaaaattagscgggygtggtggcgggtgcctgtagttccagctactcgggaggctgaggcaggagactggcgtgaacccaggaggcggagcttgcagtgagccgagattacgccastgcactccagcctgggcgacagagggagactccatctcaaaaaaaaaaagaaaccttctggaaaggattcacctttctagatgccattaagaatattcatgatycatgggaggaggacaaaatatcaacataaacaggaatttggaagaagttgattccaaccctcatgggtgactttgaggggctcaaaacttcagtggaggaagtcactgcagatgtggtggaaatagcaggagaattagaattagaagtagagcctgaagatgtgactaaattgccaagatcttatgattaaacctgaacagaattgccaaacttgaacagaattgccaaaatcttatgatcaaacttgaagagttgcttcttctggatgagcaaagaaagtgggaacatacagaaaacaaatattaaatggcagatttaaatcccactaggccactaattaaatacaatggtctaacacaaataacagagactagcggaagagattagaaaatacagcccaactatatatgttggttataagaagtgttcttcaaatataatgacatgggtaagttaaaggatggaaagaagatatattatgcaaacagtaatcagaagatagctggagtctctataaagtgggaaaaaaaaatgaccaggaacaaagagagactttaaagggccaaatcaccaagaaggcacccttgagtattttataaatgtcagttcattccatttggttgataatgttgttcatgtcctctccatccttggcaatttcttttctcttctttttttttgatacagtatctctctctgttactcaggctggagtgcagtggtgggatcacagctcactgcacccatgacctcctgactcaagcgatcctcccacctcagcctcccaaagtgctgggatattacagacatgagccaccacatcmagcctggcaaactttttatgtaggagttcagacaagtatcttagcctctatgggccacatgcagtctctgttacatatttgtcttctgttttttttttccttaaccatttaagtacgtaaaacctattcttagctcacagactgtacaaaaacaggatacgagccagatttggtcatggaacatggtttgctgaccaaggatctaaatagatgcagagaaatcatttgataaaataaaatatccatgattaaaaaaaatcctcagcatctagaaatagaaggggacttcctcaaatagacgagggacattcaaaattttcactgtgcctcctgatgaggaggaagggatggccatgacttttttcttggtgtttgcaaagagtagggcagatatagtgaaaagtttctgtcctggtcagtcattcttttcccaacactttggctggaaagagtaagattttcttagggcgtgttttgtctgtgaacgttggcatgtctgtgttataggcactttgaaagcctaaggcctggttacgtaaggaatcaaaccagaaacctagggaattcatcattaggtcattcctgggtctcaggttactagccagtttgtcttcttttcttcactttttcagaatcttctgttagttgcattataaattttattcagtttttttttctttttggtgattaatgagggaatagcatggtatgtgcttattccatcttttcgtaaattaggggtttgagatagcttttaaaaaattatgcataattagttctcactgttatttttgttttttaagcctaaggattttattggggcaacttctgttattttgttagcttttgagtagtgtgttaacatgaatacgtacgttgttaatatctcattttagttctgagcatctcctttttagtcttatcaagttttcagcttgtacagatgtgaatttctgtttttgctaagtaccctacagatagccaaaataaggagtggttagcacggattgtcaactcattcttttttttttttgagacagagtttcgttcttgttgcctgggctggagtgcagtggcgcgatctcggctcactgcaagttctgcctgccgggttcacaccattctcctgcctcagcctcagagtagctgggactacaggcgcccgccaccacgcccggctaattttttttttttaatttttagtagagatggggtttcactgtgttaggcaggatgctcttgaactcctgaccttgtgatccgcccgcctcggcctcccaaagtgttaggattacaggcgtgagccaccgcgcccggccgctgttcttactgtctttatgaccaaaaaggtagaagagtacatagtgtgcagatttttatataatgtgttgactatattaacattcctctccttgcctgcaaaaaaaagtcttcagtaatgaagagaaggaatccaaccaagagaaattataccaaggtgtgagaggtctaggtgggcagatggcttcagcccagaagttcaagaccagcctggataacatggtgaaaccctgtctctaccaaaaaatacaaaattaaccaggcatagtggcatgtgcctatagttccagctactcaggaggctgaagtgggaggatcacttgagcctggtaggttgaggctgcagtgagctgagatcatgccactgtactccacccacgggaaaagagtgagatcttatctcaaaaaaaaaaaaaattataccaacatatttgcagttggatagtggaattggatagattattgacatttgaattgtttctttgctgtgtttggtgagtataaacttagaaatatcaaaagaaatatatgtttatattccttaacattttatttaaggatatgatgcattaaaggcaatatttttttttccacatgtttttattgcttaaaggtgggaaaggtttttattcctggactgccagctccctctctgacgatgtccaacacaatgcctcggcccagtactccactagatggcgttagtactccaaagcctcttagtaaactccttggatcattggacgaggtaagaaaaggactaggtgttgccaaaaagttaacattttttaaagaagtttggttaaacattagttctttccatggttaacttaattttagtttctacttgcagaataaatgttttcaaacagaagtgattcagttaacatacactgacctcccttgtgatgtatgtgatactttttgaaggtgctggagagatggaaatgatacattcttttccatctagggatctcacaattgtgtggagttgatgtactgtctgcataagaaattagaatttaagaaagactcatgactcagtaatgtggaaaagagagtrccatcgttgattgactgatgggaagataacatccgatgggaagataacatccaatgggaggacatggcaaaatcaaagcctcactgagagacatgtcagtcttcgtttggaccttggggttgagtaggatatctgtaggtagaaaggagcattcagggcaaggagaaaccacacaggcacaggcaggaaggccagataatgyggaacattttttartggatatttgtatcttcatctcctagtcataaggactcaataaatctgtagaataaatacttataaaagtacaagtagtctgtagggtgaggcaggatagggwttggataacaataataaccttttttgagcattttytatktgctaggcattgttctcagtgctttattagtattaattatttccttagaatagctttattgagaagatagtactatgattcttttttttacaaatgagatagaagttacaaatgaaataaacctaataagtggtagaactgggatttacactcttactaatgtgctcttaaaggsagaaaggatraaaakgtggttttyttytgaatgcaattgacagggcattacaggattttgagaaaggagttaygaggttttggatctgtgttgtaaataggtgtattttgggattaaagataaggagaccggttagcctccaagtgaggttgtctgtgtcagtttaagaagtatgaagagggtctgagctagggcagtatatgtgtggaaaggagggattaatatgagaggccttgagaggtggaaatgagtttgtcagctgattggttttgtgctgctgggctggggaaaggtgatgtggaaggaggctccgaattctctgaacgacctgggaaggtacctggatttaccaagttaggaagcctggagaaaagtggtttgtatttaaaggacatgtgagtgtggatgtttagggacggttcaaagggaaggttagtgctatcwgttgtatttgataatgtctrtgtcttcattatatttttaaacatgtgccacattgaattttttttccttcaaaccagcacatttgcagaacattcaaagggggaactggagaagtgtcagagtgttytgtgtgatttggaagaatttcttttataatggaaaatggtttccaacttttttagaattctataagcctggtaatagtgcctttttgataggtgtaaggtcatggaaatgatagtctgacacattggctgatggcttttccacttctctggaagattttgctagtagacttagagccaggaccagtggagctgaatttttcctggtgacttttagagtagaatctggaatagaataaatacatcttagtcttgattgtcagtgttgacaagatattcacttagagatatataaattgaattaaaggaatcaaaaaaggatcagtggtcatgactagagattaagattggaagcatctgcatgtagatagtaactaagaccatttaaattttttgtttgcatatctgcagttaagcaaataaatactgttcctgtatttttgaataaataattgcctataggggaaataccactaaatactggtctcatttgttggctttttcattactgtcctttcttcctgggctcttagttcctcagctgcctcaaatcacagtttagtcttttttttttttttgagatggagtcttgccctgtcatctaggctggagtacagtggggcaatctcaccgtactgcaacctccacctcctgggttcaagcgattcttctgcctcagcctcccaaatagctgggactacaggcacccgccaccacacctggctaatttttgtatttttagtagagatggggtttcaccatgttggccaggctggtcttgaactcttgacctcaagtgatccacccgcctcagcctcccaaggtgctgggattataggcatgagccaccgcgtgccccggctcacagtttagtctttagccctgtaaggttgctaacagtgctgctggcttctctccctcttagctatgactttccttgcatattgtcagcctttccatatgttcctcttaccaccaaaatttgcagatggccagagcagaaaaagcaaggctctccaagaacgttggcccctttccctgcagttgccttctctcctagatcttggtccctcaagtccaggttgcttccacagcttttccatagccaccaatcagatgttttccttttacctaccttttctagttgttttctgtgaggaccttggtttgctggtacttcattgtatctggaacaaaatgttttaaasagcctgggtcttgccgtgtcatccaggctggagggcagtgactattcacaggctcactacagcctcaaattcctaggcttaagtgattctcctgtctcagtcttctgagtagctgggactatacaggtgtgcaccaccatgcttggcttggagcagaatgtttttgaatcattacatattattgtttgttagaccatatgcaaaaaagaaacagttaaatttccttgtccttaatttctcagaaaacaattcatttgtrtcgtatttacaactttttacaggttgttctgttgtccccagttccagaactgagggattcttcaaaacttcatgattctctctataatgaggattgtactttccaacagcttggaacttacattcattctatcagagatcctgtccataacagagtcaccctggtaagtataaacatttggtagctttccaagaagtgggctggcatttcaaatttgacagaatacagaattttgtctgaaaaatgacaacaaacatttctcatgatttaaaaaaatctattgtgtcattttttggcacgattttactttttactatacagtaattctgcttgttttctacagtttctgtattattaaaaacttagtgaaaacaaaagcttgttgagtcagttgaattgtatattgatgtgattttttgtcttctcattaaaagtaaatgtccttttgatgatggtgactcactgtataaagattagacactttttattaaaacaagcattttggaaaacattttgcaaataattacatttaaagtttctgaaattcggaagtgttcatttctgtttgaaaattgtttttcatttattttattgctttgatgggcaaagtcttgtaccagctatttttaagacattcaaagacttagaatgcacagattttatctactttctcatttgtttccatctaggaactgagtaatggctccatggttaggatcactattcctgaaattgccacctctgagttaggtacgattgagaagtttcatttataagacatgaagtaattgtgatttacattaataaytggggttttaaacattattttgccatttttgaagccactggatcaagttyttagctttgtagaggagcyttaaagagctagggagtgctttgtgatgtccactctaygtgygctytaaggctggagtacaggtgaaggatgtgctakttctgttcyctgaggttyttytgttggggaatattgtgcagtataataatatatggacatgcctgctgggcatggtggctcacacctgtaatcccaacactttgtgagactgaggcgggtggatcgcttgaggtcggtagtttgagactagcctggccaacatggtgaaaccctttctctactaaaaatacaaaaatcagcggggtgtggtggcgcacttctgtaatctcagctacttgggagtctgaagcaggagaatcgcttgaacccagaatgcggaggttgcagtgagtggagatcgtgccactgcactccagcctaggtgatagagtgagactctgtctcaaaaaaaaaaaaaaaaaaaaaaaaaaaatatatatatatatatatatatatatgtatatgtatatatatggacatgcctcttgcaagaacatctgggaaactggaagcttaagcaactaagataattcttggcatatttaatgtttttttttctgtaatgtattaatgatgtttttaattttaaaataaatatctcaattttcagataaattgtgaaagtaacctaattgccttaattgaataaaacttaatattattgtcaaaatacaatcagaattatcttaataaatattggattctgcttgaattattcctgagatgcaatttcaaaaatgcttgaggagaatatttctgaacatagcatagtaaacaaaatgttagaattgaagggatttgccaacaaacgtaggttaagaaaagaatgcctgtatgatataaggaagttcatgacatatcttggtttcaaatctaactgccaaagcaggacattggcagattgtagacaagaatgactttttcattttaggaattttcactgctggtaaatggtattccaagttgatatagagattccttgccttctaaaaggtattttttttttttttttttttgagacggagtctcgctctgtcgcccaggttctggagtgcagtggcgcaaactcggctcactgcaagctccgcctcccgggttcatgccattctcctgcctcagcctcccgagtagctgggactacaggtgcccgccaccacgcccrgctaatttttttgtatttttagtagagacggggtttcactgtgttagccaggatagtctcgatctcctgacctcgtgattcacctgcctcggcctcccaaagtgctgggattacaggcgtgagccaccgcgcccggctctaaaaggtatttcgtaatcacaaggccaggtacctcgaactattataagcctaagcaaaatatataaaaacaaataataatggaataaattaaataaatgaaaacaaaaawtcttacccctttatagccaaacagaagccccatagtttatgcacataagtttatgtactttacctgcagagggttctcacacactcatgcagcattgggtttacacttattttggattccactatgacatacttggttatttggtattttaatattatttgcttccaacctgtgctgtgtgagtttgcacattgcaaactgatgggatagaggatatgttgatgagggtgggcccagtggcatgacagtggaaagggaaaaaagaatcctggaagagaggatatgtgagtacacaaacattgcagtttgggattatttactactaaaagcagatttgggtctcttcacagtggtagccctggccactctgaggggatcattgtatgacagtgtagtgctataattgatgtggagccattgagaatggtataaggccaggtgtggtgggctcatgcttgtaatcccctccctttggaaggctgaggtgagggggttgcttgaggccaggaatttgagaccagcttggacaacatagtgagactctgtctctacaaaaagaaaaataaaattagccaggcatgctggcatgcatctgtagtccttgctacttgggaagcttgagctggtggaccacttgagtccaggagttggaggtgacagtgagctataattgcaccactgcactccagcctggggacagaggaagaccctgtttccccttaccaaaaaaagaatggtgtaaattatgtggtattaactcttaacccttttaagacagagagcctgtgaaacattttagaaactgaacgacctcagaaataaagttataaagctttggttaataggcatgttaactcatttagaacatcatgtaatgctagctaagcattgctattcgtggatgcatawattgaatattatatatttactgaagtatgtaggcagtattttatataaatgtataaacatagaagttgtatgtttttcatagtgacttttttttttttttttgagacagagtttcgctctagtcatccaggctgaaatgcaatggcgtgatcttggctcactgcaacctctgcctcccgggttcaggcgattctcctgcctcagcctcctgagtagctgggattacaggtgcctgccacaatgcccaactaatttttgtatttttagtagaaatggggtttcaccatgttggtcaggctggtttcgaactcctgacctcaggtgatccacccgccttgacctcgcaaagtgcttagattacaggcgtgagtcaccatgcctggcccatagtgacttttaatttgtcacccgagctagaacatctttaagagtgaaggcgagcagttagtaattgctgggcaatggatgtaaatcaggactgtctctggcaaactgggctatttgattactttatttctgatgcaaaattaatgatcaaaaagctgtccttggccgggcacagtggctcacacctgtaatcccagtgctttgggaggccaaggcgggtggatcatgaggtcaggagtttgagactagcctggccaacatggtgaaacatggtctctactaaaaatacaaaaattagcctggggcagtggcagacgcctgtaatcccagctacttggtggctgaggtaggagaatcgcttgaactcaggaggcagaagttgcagtgtgccaagaccgtgccacagcactccagcctgggcaacagagcgagacaccctctcaaaaaaaaaaaaaaaaaaaaaaagctgtcttcagacccctttcaagccttgttgaattcagtagttggttttagtttcagatgattggttaggtaatgtttgcatctcattggctctttaatgacagttttcttttcataataattggcctttacatagtagaagttaaaaaacttggtgattgaaaggggaaaagaaatgcatgcagagtaagaatactaaaattaatctttgcttttaatagtacaaacgtgtttgcaagcaattaagtttatcctgccaaaagaaatagcagttcagatgcttgtcaagtggtacaatgtccacagtgctccaggaggacccagttatcactcagagtggaatttatttgtgacttgtctcatgaacatgatgggttataacacagaccgcttagcatggactagaaatgtaagtaaatactattgttttctttatgagttattctgttaatgtaatggttgcataattggtaatataacattgagactacataataggcgtaccatattcaaaataatagaataatattaaggtttattgtatctatatattgtaaataaaatctcacttaatatttaatattaacattttactagtgattataattactgagctttagaatgttaaagcatatatgactatttctcatttcacctttgtaaaatgactgcaagttatgctaggattagtgatagtcttggttttattgatgaagaaactggatcacaaagaaatcacagatctgtggttttttaacaactatgactagactgcatcttctgactccttgtttaacattgttttctgaagacaagattgtctttttacacacatattgcttgggatgtgaagaggaaggtttgatttgagggagatttaaagtactttagcctgagtatctactctgttaatggtataaagccttacctctcaccctcttcctgcagtaacatccttacaggcccttattagattatttacaaaatcagcagagtggtgtcttcagtattggtgatctccttctagctttggagatcactcccaggacaactttgcctgggtcactctgaaaaaaaatcactctagattataattaccccttttccaggtagctcagctgtaccattctatatgttttagccttgcacagcaaatccatttttttttttttttttttgagacagaatgtcgctctgtcgcccaggctggagtgcaatggcgcaatctcagctcactacaggctctgcctcctgggttcacgccattttcctgcctcagcctcccgagtagccaggactacaggcgcccgccaccacgcctggctgattttttgtatttttagtagagacggggtttcaccgtgttagccaggatggtcttgatctcctgacctcatgatctgcccgtctcagcctcccaaagtgctggaattacaggcgtgagccactgcgcctggccagcaaatccatttttaaaatttgttttttgtcttaattatgaaaggaaaatgtggaaaatggaggaattaagaaaataattatactacttagagataaccactctaaatatttttgatgttaccttctatataaaaataccaatgaaaatttcccgtatcattaaaaattttttctaaaatatctccatcatttcttcatagtgtagttttatcatagttaaccaatagctaataattgtaccttgtgaatctgttgttttcgttattgtaatttataaacatcctttttcacgactctttaaccacatctctagttacttcccaagcattgaatcttaaaagagaaactgtgaggtcaagtaatgtttggaaaggggttcccaggtgacattcttactagcatcatttaaaagcgcccatttcaccacagtgtttatttgtggtgtggtgaacctttgccagcttcctgagaaattttatcttatttctctataagtaaatgggaatgtttttttcaaaatttcatcagttatttatagttcttattttttgattcgtatttcatgtcctttgtctatgttccagtctcttctcagtccagtggccacagtaatcctgtttgataacgtcaggttgcgttcgtcacgcctctgcgtagaatcccccagtgacttcccatgtcactcagagtaaaggccataggcttataagatgccatgtgacctagcccttgctcaccttcctgctcttatttcttaatgctttgcacacatcatcccagccacattggcctcagctctgttccctgagcactgccagcatgtttctgcctctgagtgtttgcacttgccattacctctatggagaatgctttccctccgacaagacgtgcttaggtctttattcagatgtcacctcagtgctgcctgtcctgtctcyatagaattacacctgcctccatacctttagtgccatttacctgtttttttttcttctcacttaattaaatataatatactatatgttttacttattttgttttgtgtccttcctcccccaactggaatgtaaattctaggaaggcaaagatttttgcttagttttgtttactactctctctctccaggacctgtggtattgcctggcatagaaggatactcagtgaacatttgttgagtgaatgccattttccatctgagtgagatactgtttttaagagtttgtgtctatttcagcacatgaaggaattgctctctgcaatttccttgagagaaatcttatgggaaaatagggacaattttcttttctttccttttttaagacggggtttcgctctgtcgtctaggctggaatgcagtggcgctatcctggctcactacaacctctgcctcctaagttgaagcgattcttgtgcctcagcctcctgagtagctgggattacaggcatgtacctccacgcctggctaatttctttatttttagtagagacggggttttgccgtgtcggctatgatggttttaaactcctgagctcaagtgatcctcccaccttggcctcccaaagtgctaggattacaggtgtgaaccacggctcctggccttcttttcttattttaaacaattgtatccgagtgacattatccccaatttttctgttctttattacatgtgaaaagattaagcctcatagaaactggatttctacattatgaaaaaacgcgtcagctttctgtagttttgtgtatcattgtccttgtaacttgttgatgagtacagattgttgtgtcctagtctctggcagagaacctatgccccttcrcgtttccatgttttggggaggactgagcacctacccattttttcctttgcagagaaggacatggctttttgacttacttattgcatgataattataaaggaaggaataaggaaatcaattcttgaggccaagttgctttgcyatttatttataggactgcatggttaaacccttgttatcttttgtcctcatagtcaaagcttaggataaaatggtcctcattggcaaatggttttcattttgctttgttcagatttattctttttgttttcacatatrtaatgtggtggagtacagaatttctgccaatgactcgttacacaatttttggcatttctttgtgctttctttaatttgctgatgtgttacatgagtgcactggactgtacattgtaggaacagttgcatttggggttaactttttgtggcttccgggctgctgtttttttccttagataaatattgaatccctgctgtgggccaggcatgatgccaggtttctcacatataccccagacaaaacagattgttcctctggaattgactgtcttgggggaaacaaataaataatatttgataaatgtgttatgatagatgaagggtaagggtccataggagcatataacagggttggctaacctgagacacattgaaagagtgaagattaaacagatccatgtatggcacaaagagccatccttatcaggcagtttctactttctcataactccaggccttatgaatctgataattatagcagggacattctttttgactgtgggagtttgtgtgtgttacattttggttgaagttttaggttagatagttactgttatatttgttgctttgatttcactgttactaccaggttttttataatatatatgagttgggctgttttttatttgaacgcttcacaagcagatcttctctctcaataacattcagttttaaatatcactttattgctacctatgtttagtttttatatagaaatcaactctgtttaggtgagtgagttgataaatatgtaagtttttcagcataggaaaatagccattrccatttatagagttacagtttattagttgatggtcaatgyccatgtgaagtagctggggcagcaaagattatgccaggggaaattgaagaagagcaacttgtagaaaactgcttttatgtagttgtattagttagaagataggctcactattgtaatagaaaggcctcaaaagatacaatggctcaaacacaataaaaatgtctgtcttgcttacataacagggcttagcagataaacaggccacacagttattcaggaacccaggttgatggaggatcttttatctttggttcaaagattgccattggttgactgcattccagtcaggtggaaggggcaaagagcctggaggagcaggggtaggactggactggtcctggaagtgatgacagtgacttccatttataattaactctgtcaaagggtcacacctaacttcaaaggaggcagacgtatgtatgtagtctggctgtgggttcaggagaaagaggagaaaaaagattttccagagtagctacttgtctctgccatagaattgttagatagtttactgtaggtggactgtaaataaatgtttgcttagttctaacatttgactgatattgggttgatcctttgagacttggtatattgtggatatgcctaaagtttctttttctaccaaagatgtgatgtaatctatgtygttacaggagtaggagagggaaggaaactaccattaaaatcagtccttagaagcccaggcactgttctagatgtttgcatatattaatatgatttmatttcatctttacagtaacctggaagaaagatatttaaataatgcctttccagatcaaaaaatgagttttgatggcttttctcagttttcgtaattggcagaactgatttcygaatccttgaagttgatcagttgacaggaatgcatttacgatttttatcttttcttttggggttacytttcagtttgactttgaaggatcactttctcctgtcattgcgcccaaaaaagcaaggccttcygagactggatctgatgatgtaagcattattatttcttgctaatataaattaatttatggatattcatactattcttccacttctgtggtattcctatcaattcctctatctttccaacacctttcactttatttattttaatactgaatagcaattattttgaagagtaggatctgttacattttctgtggtctttaatgattatctaaaaattaatacatgtattactgcatgatttcagtttgggtttgtagacattttagtatcaactgatcacctgaaatgacagcatttaccttttttatgcagtgttttttaaattaaggttctcaattgtatcaggttccatggtatattcctttttttttttgagacggagtatcactcttgttgcccgggatggagtgcagtggcaggatctgagctcactgcaatctccgcctcccaggttcaagcagttctcctgcctcagcctcctgaatagctgggattacaggcgcccgccaccatgcccagctaatttttgtagttttggtggagacagggtttcaccatgttggccaggctggtctcgaactcctgacgtcaagtgaccttcctaaccttggtgtcccaaagtgctgggattacaggcatgagccaccacacctggcctccatggtattattcttcagtggtccaaatatgtttttttaaattgtggtgtaatttacaaaaatgaaatacagcttgggtttagtttgatcagttttaatatatgcacactcatgtaacctacactcctataaagacacacaatatttttataactccataaaatttccttgtgtggtttttttttttttgagacggagtctcgccttatcgcccaggctggagtgcagtggcacgatgtcggctctccacctcctgggttgaagctattctcctgcctcaacctcctgaatagctgggattataggcatgcgccaccacgcctggccaatttttgtatttttagtagagatggggtttcaccatgttggtcaggctggtcttgaactcgtgacctcgtgatctgcccacctcggcctcccaaagttctgggattacaggcatgagccactgggcccggcccctcttgctgtttttaatcagctttattctcttcttctagcaatcactgatctgaattctgtcaccatatcttagttatacctgttctagaacttgatgtaaataaaataatatagtatgtaatctttggtataagatttattcagcataatgcttttgagattaattcatattgttacagataccagtagtttgtgcttttttattgctgagtagtgtgaatataccatagtttgtttatctatccttcttctgctggtagatatctaggctatttccattttttttttttaaagtcttatgaataaagcaagctagtgccaaaattcactggcaagtctttgtgsatatatattttctttttttttttttgagacggagtcttgctctgtcatccaggctggagtgcagtggcacgatcttggctcactgcaacctctgactcccgagttcaggcagttctcatgcctcagcctccccagtagctagaattacaggtgtgtgccaccatgcctggctaatttttgtatttttagtagagactggattttgccatgttggtcagtctggtctcaaactcctggcctcaataatctgcccatgttggcctcccaaagtgctgagattacaggtgtgagccaccatgccgggcccgtggacatacattttcatttcttttctttttttttttaagagacagggtgtcactctgttgcctacgctggactgcagtgatgctatcgtagttgactgtaatcttgaactcctaggctcaagccatcctcctacctcagcctccaagtagctaggactacyggtatgctycatcacgcctggctaatttttaaatttttttggtagagacaaggtgttactataatatgttgcccaggctggtctcaaactcctgggctcaagcagtcctcctgcccctatctctcaaagtgctgcgattacaggtgtgaattttaatttcttttaatttaatttaatttcttttaaattaaaattcacatctgtaattttaatttcttttaatttaatttcttttaaatgaaaattcacgcctgtaatcacagcactttgaggggtaggggcaggaggactgcttcagcccaagagtttgagaccagcctggacaacatattatagtaagaccagttgtctaccaaaaaaatttgaaaattagccaggcatgatggcgcataacctgtagtcctagctacttggaggctgaggttggaggatgttaaacactctttcatgtgctcattagctgcttatgtatctttttgtgaagtttctattcaaatctttatctacttgtaaattagattttaaaaaatatgtaagctgttgaagttcttacatgttctagacatgagttcttgaccatattttcccttagaatgtggctttaacagtgtctttgatgagcagaattttttattttagttatccaatttatcagttttttattttattttattttatttttgagatggagtctcgctctgttgcccaggctggagtgcagtggcatgatctcagctcactgcaagctctgcctcccaggttcatgccattctcctgcctcagcctccccaatagctgggactaacaggcgcccgccaccacacccggctaatttttttgtatttttttagaagtgatggggttccaccgtgttagccaggaaggtcgtgatctcctgaccttgtgatccacccgcctcggcctcccaaagtgctgggattacaggcatgagccastgcacccggcccagttttttcttttatggttagttctttctgtatctagtccaakaatttttaatttagagtaacacactgtattaagccttacaaaaacatcagtaaattccaagayctggaaatagcataaaccacattctctgaaccaaatgcagtaaatcacaagtagaaccaaaatagacttgaatatttggaaaatgtagtccaatcagtctgaatataaaaatcagttgattattagattatattastagcccyggcatcttatacatgtggaaagatgaatacaccagmtgaatgcaggtggaccttccttcttaccaaaacacagttcagtgtagtggccactaacttgccatctacttttcctataaaacctagcctgagataatcttaaattttctctctcaatctctacctaaatwgtataattcttctcccaatgtctttcctaaaaggkcatgaaaakattttttttaatggtttttaaaggtggcttgccttaacgtttataactggcttgctattttatagttacttcattcttagcattgtcttttttttttttaacatactcttagatcaacttaatgtgaaaatgaaacttgaattgttttaagtgaattaattttcttatgatattataaggaggtattatttttaaaaattaatattctttttattcttctcaggactgggaatatttactaaattcagactaccaccagartgttgagtctcatcttttgaacagatctttatgtctgagtccttcagaagcttcacagatgaaggatgaggatttttcacagaatctcagtctggattcttctacacttctctttactcacatacctgcaatttttttcgttcttcaccttgtgtatgaggagcttaagttgaatactctaatgggagaaggaatttgttcactygttgaacttctcgttcagttggcaaggtaaatttgtttgtaggttagaaactgccaggaagtcctgagatgactgtcttttccatataggaaccttgtatcatatagggaccttgtaaataagtttctgaaatctaccttctcagaaaactaggrcatctctgtaaaccacagagttgtttgaagatactggttttgtaagggcctgtgagccatgcagggatttttagtctttgtcctgagattagtggaaggtcacgaaaaaatggagatgacctgctcagattttcattttgacaggatgactgactgrctatactgyggtgggagttctagaataacatctgctgttttgtaatatccacattcaaatagtgctttatagttgacaaaatcatagtttacatrtaaagtctcaaacaaggtaagtttcctrttttagtgatgaggaaacttgcctaaatgtctttcctgggatgcgagtgtttgatagttgtggactcattttgctatgctgtccttgttgcagtctgaggttgtccctgtctttgaggcactcatagtagatccacaataagatagttctaataatacgtttcaacacctttcaagagctttgaagcacctggtgtatggctcagaattctagggtcatacttgtgtgttgtttgacctttatgacctttggtgataaagaagttgaatttgaattgaaatgtcaacctctgagttaagacatagtacattttctaatttctgttgtcttttttgagatcttgaaattcaatcctgagacatggcagttttaatcaatggtaaatatctcttaggatgtcattactgtcatgaaaattcttttgtaattaagtaatttccaaaccataatcatggctctctgaaaaaagtaatgtgtatgatgttttacattttatcaggtttttttttttttacatattttatcttatttaatctttaaaacttcagagtaagtgagctggtwttgccccattttctagaagaaaatactgaggtttatagacatgacttttggaagatcacacagctaatagcagaggaggaactagatcacggkgcttttactgtagttttacttccacaaaatttagcaaaaagagattgggttccatttgtcacactgggcactttaaagtccaaaaatacaatagagagactctagatttggttwtctttctcatawgtaagtttttaaattaaaagattcaactaatcaatccttccaattctgttgggagaaagtgctgtaataccttcttttttacatgcccttactgttttagggacttaaaattggggccttatgtagatcattactatagagactacccaacgcttgtcagaactactggacaagtgtgcacaattgatccaggtaagtagtcgtgcttttaaatattttctaaacagtgtagtgatatttccttgtatctttctcattgaatagcagaggatgtatttcttaccattagcttctaagtcaggggcagtgcctttccaccaggcagattttagttcgtagtgcttgttttctgacacgtagtaagccataatatcttcagtgtatagggaaaatgttacccatccctaaggttctgacttgcaaaagtcagagaaagcttccagggtcaaggatgctttttttttttttttttttgagactgagtctcgctctgtcacccaggctggggtgcagtggcgcgatcttggctcactgcaagctctgcctcctgggttcacaccattctcctgcctcagcctcctggcctcctgaatagctgggactacaggtgcccaccaccacacctggctaatttttctgtattgttattagagacgaggtttaactgtgttacacaggatggtcttgatctcctgacctcgtgatccacccgcctcggcctcccaaagtgctgggattacaggcgtgagccaccgcgccaggccaccaaggatgcttttaacttagacttgtagtgtacagttagtaccactaaccatatgctacttaaattcaattaaaataaaacatatttcctcagtgcactagccgcattttgagaactcagtagccacatggggctagtgctaccatattggacagtgcagatacagacacagaacatctccatcaccactgtactatcctagaccctgagctaaaggtactgaaatttgggrcccagttgttggaacagacctgaatcctggatgtttcttttgtttttttcacctttaggtttagggcaagatttttgattagattcttytttttttttttttttttttcttgagacagggtctcactctgtcgcccagacgggagtgcagtggtacgatcttggctcactgcatcctctgccttccaggctcaagcgattctcctgcctcagcctcccaagtgcctgggattgcctggggttacaggtgtgtgccaccacgcctggctaatttttgtatttttagtagtgatggggtttcaccatgttggccaggctggccttgaactcctgacctcaagtgatccacctgactcagcctcccaaggggctgggattacaggtgttagccaccacatccagcctttggttagattctttgtatgccttgggaacaagaatttgctaaatttccatccagggtgggataaaatagaagtcatttaaattctacatttaataacatagttccttatgtactgtggcagaaaacatgaagcattttggagaatatggaaaaacgttattcttttttttttttttttttttgagacagagtctcgctctgtctcttaggcgtgatctcggctcactgcaacctccacctcctgggttcaagtgattcttctgcctcagtctcccaagcagctgggactacgggtgcgcaccactaggcccagctaatttttttttgtatttttagtagagacggggtttcaccatattggccaggctgtccttaactcctgacctcgtgatccacctgcttgggcctcccaaagtactggggttacaggcgtgagccactgcacccagctggaaaaatattattctagttgtttcaaaatgacaagtaactgttgatcatcttccgtttaaaataaaataatgttgtcttaatgtattttcgtgtctttttgaatatttatctaattttaaaggtcaaacaggatttatgcatcatccatcattttttacrtctgagccaccaagtatttatcagtgggtgagttcttgtctgaagggygaaggaatgccrccttatccttacctccctggaatctgtgaaagaagcagacttgtagtcttggtatgtatgtggagtgttactacctatctcctttttcttttaaaatttagttttaaaaagtacacctratattaagtttttttctgtgtatagttctgtgaatttcagtacrtgtatagattcatgtaattactacaatgaggatatagaacatttacatcaccctcaaaaatttctctcatgatttcgagacttatccaagttgtttcctgtatcgacagttcatcgcattctatggctaattagtagtttattgcatgaatgtgycatagttggtttttcattcaagatagttgggttgatttcagtttttagcaattgtaaatatagatgctgtcagcattcatgcttagcgttttatgtgaacataagttttgctttctctaggacaggtacctrggagtaggattgatgggtcatayagttaagtttatattttgtttttaaagaaactgtcatctgttttccagagtggctcttccattttacatttttaccascaatatttaagagatcatttacctgcattcttgttggtrtttggtattgtcactcttttttatttttgtctttctgagagatgtgtagttatacctcattgtggttttaatttgcattttcctaatggctaatgatgttttcagsgttctaggtatgaggttttgtcagatatgtggtttgcagatattttcttstggtttctaccttgtcttgtctcgtcattctctwaatacatcaaagarcaaaagtgtttaattttgatgaagctagtttatctgtatttttctttaatggatrttgctttyagtgtcatgtctaataattctttgtttaacttcaggttttgaagattttctcctgggtttctttgcatgttttacatttagatctctaatccattttgttaatcttttataacatgtcaggttttaagtcaaggtttttattatttcatttggatatccagttctttcagcactgttttttraaaagactatccttyctctattgcatttgcacttttgtcaaaagttaatttggccacattcttgtgtktctgtttctggactttctattctgkttcattgatctttgtggctgtctacgctgtaattactgtagctttatagtaagtctttaaaattgattagcgttactcctcccttcattactcttcttgccttttcatactgattttatttttatttttatttttgagacagagtctcactctgtcgcctaggctagagtgcagtggagtgatctcagctcactgcaacctccaccttctgggttcaggcgattctcctgcctcagcctcccaaatagctgggattacaggatcccacaccatgccyggctaattttttgtatttttagtagagacggggtttcaccatattgtccaggctggtctcgaactttcaacctcaagtgatccgcctggctcagcctcccaaagtgctgggattacaggtgtgagccaccgtgcccgtcccatactgattttataatcagcttgtctatagctacaaagaaaaatcctgttgaaatttttttcaagaaacacttctttatttatttttattattttttrtttacctctagctgcaaatctcatgatttatttatttttagaaattagtttgttattactggttaatacatgtccaagatcaaaccttcatatagaaccatagggctgtaacggtgaatraggtaagtttcttggcatacctgttcctcagtccccccatcctggarcagcctgctcataggccccttgtgggcctttccaggtggggtcttcccaggcttgcaggagaaccatatgcttttgtcccttctctcaaatgttggcagactgyaaatgtctttkccycctgcccttctttttctttactytacattttgctcygcttcatggtgagaagtgcttcacagtcccccccatggctccaaaacagacatacagaatgatgtttctgtttaaaaaacacgggatttttttaatgatagcaaaatatatataacataatatttgtcattgaaattgttattattattgtttcttgagacggagtcactctgttgcccaggctggagtgcagtggcacaatctcggctcactgcaacctccgccacctaggttcaagcgattctcctgcctcagcctcccgagtagctgggattacaggcgttagtcaccaagtctggctaatttttgtatttttagtagagatggggttcaccatgttggccaggctggtcttgaactcctgacatcaggtgatctgcccaccttggcctcccaaagtgcaggggttacaggcgtgagccactgtgcccggcctgaaattatttttgagtgtacaatccagtggcgttgaatacgttcacattgttatgttgccatcaccactgtccgtacccaagactttttcatcatccccaacataaactctgtacctattagatagtgactccccattccccttcctcccaggccctggtaattccgttctgtttcttatgaatttgtctcttgtaagtacctcatgttatgggaatcaagcaatatttatctctctgtgtctggcttatttcacttagcataatgttttcaatgttcatccatattgtagcatgtatcaaaattacattgttttaaaggcagtattctatatagtattccattgtatggatataccacaatttatcatttcacctgatgatggacatttgggttgtttccaccttttgactgttgcgaatagtgctgctgtgaaccatgggtatgcaaatatctgttcaagtctctgctttcagttctttttaatatatacctggtggtggaattgttgggtcatatggtaggtagttcgatgtttaactttttgaggaactgctaaactcattttcatagtggctataccattttacatccttatcagcaatgcaagaggaagggttccaatttctctacrgtcttgccaacacatattattattttctatttgtttttttaaaaattatagccatcctagtatttatgaagtgatatctcattgttttgatttgcctccttaatttagtgatattgarcatattttcttgtgtttattggccatttacgtatcttctttgaagaaagatctatgcagatcttttgtgtatttgaaaattggatttttattttcaagtttaggcatttttatgctctagatattaatgtgtcagatacatgatttgcaaatattttctcccattctataggtttttctgtgaatgtcttttcagtaaaactgtcatgagtgctcagtttacctctctggcctttcatcttagttttatcctcttcgtattcctttataacttgttagctcagagatctatttataaaaatatgaatttaatttttatttataaaaatattctgaaaaatatcaacagaagcccttgttgatasgtttttggtttcstcattataagttttattggactttttttaytttttattttttttatttgagacaaggtcttactctgtcacccaggctggwgtgcagtggtgcaatcatggctcactgcagcctcaacctcccggggctcaagcagtccttccacctcrgcctcctgagtagctgggaccacaggtgcacaccatcacacccggctaatttttgtatttttagtagagatggggttttgccatgttgcccaggytggtcttgaactcctgaccgcaagtgataaattttttttatgtgatgtttagctaatgagacatttgtagtaaccttctagcttatggtggctctttttctattgastcacttgtatatgcggagatggcattgtctgtgtaccatttgttgaaatgagggaaaggaaggaagtgagataacatttattgggagcctgttgtcttcaaggaactttatgtatgttttctcatttaatagagagatcttatgtacttttgtgtttgtgttatatgttgaatattttaactcttttgagagactttttccttkgtgttatctttttcttttcctcttcaaagcaaataacactacagctctgtactactagatacttcttagatagtgagagagcactattcgatacctgttggaatgactgaaaataacttttggtgaggatatggagcaatcgaaactctcatacattactggtgggactgcaaaagtggcatggcactttgcaaaactggcagtttcttgtgaagttaaacatacactttsgtatttmcttaagataaatgaaaacatatgcctacataaagacccgcatgtatgtgaatgtctttggggccaggtgcggtggcataatctcagcactttgggaggccgaggagggcggatcacgaggtcaggagatcgagaccatcctggccaacatggtgaaaccctgtctctactaaaaatacaaaaattagctgggcgtggtggcgcatgcctgtaatcccagccactctggaggctaaggtgggagaatcgcttgaacccaggaggcggaggttgcagtgagccgagattgtgccactgygctccagcctggcgacatagtgagactccgtctcaaaaaaaaaawaaawaaataaataaataaagcagctttggtcatagtgaccacaaactggaaccaaatgttcatcagtttttgagtaggtaaacaaagtttggtatgtytgtataatggaatactacttagcatgaaaaggaagaaactagtgatccttggagagacgtgaatgaatctcaaagacttatgctaagttaaagaagtagcacaaaaaagactacatatcatatgattgatttacatgatattgtaggatagacaaaactgtagagcaagaaaacagatgaattgtttccagtgctgggtgtaggaggaaaggattgactacaaaaggaacaagggaactttttggtgtgatgaaagtatactatattgtgagtgtggtagtggttatgtgatacaacatttgtcgaaactcacagagctgtacacctaaaatggatgaattattctatgttataattattttctagttatacttcaattatgtagctaggtgtggtggctcatacctataatcccagcagtttgggaggctgaggcagaaggattgctcgaggtcatgagtttgagcccagcctgggcaacacagcgagactccgtctttacaaaaaataaaaataatataaaataataagctgggcatggtggtgtgtgcctrtagtcctagctactctggagactgaagcaggaagattgcttgagccaaggagtttgaggctgcagtgagctgtgattgtgtcactgcactccagcctgggtgacaaagtgagatgctrtctctgaaaagagaaaaataatgttaattttcttcctttgcagagtattgcactgtacatacttggtgatgagagcttggtttctgatgaatcctcacagtatttaaccagaataactataggtaagttggtgcaatgttgcctctggaaacaaatttttgtaaatgtcagtatcagaattgaaaaaagaattgaatttttcttgtttgctttggcggccatgtcttacctttttagtactgttctggtctrttgcggtcttttgtccamaactaattttcaggtatcaggattacttaaaatctaatacatcttgtattttcagtgcgggtaaaaaggactattttagcctgaaggaaattattgtaccattgactcttgaacaacatgagtttgagttgtgtgggtccacttacaatgaaattcttttcagccaaatgcagatagaaaatgcagtattctctgatgtgaaacccatatgcaggttctgcagggccagttgcaggacttgagcatgcacggatttgggtacgcatggggtgtcctaaccaatcccctgagtattctgagggccttgactgtacttttcagcctgccacagtattgcttattttatttttttttagatgttgtttgctaattgattcttattttcaaatgttttctacatgttacatgttttctttaccaggatgactatcaaaattaagtttcattttgttgccttttagccccccagaagttgcaagtagaacaagaggaaaacaggtgacttttatttagactgtgcttttatgtcaaacacttaaaacaatattatttactgttctgcttaataactttatgttttattctcttataggtttagtttcaggcattctacatctgtttctagtctagctgaaagattggttgtctggatgactaatgtaggtgagagcttctttgttacctcctaactaggccgtgcttcctccagactagctagaagtggaaggcatgaggagagaggggctctggctttgtgaaaaggcctcacaagattgagattatggttcatcaagccatattctttttttctcgacaatctcacaactttcatataataatatktgggataccagctttttatcttgrtgcataaggaatctttatttgccattwmattggaacatttgaggctgtggctatgtaagctggtctctgagaatggagaactctaatcacctacatayacacctgaaatcattgtgatactcagatatcagaaatgggtggttttggcaaagtctaaaagcaataatataaacatttcagggtatacttttgaaggataaatgcacttttgaagggatttcaggcaccaagatgaacattgaactgggaagaggaagaggaaggaaaagagttytatattycctattccccaaacctatgctcctaggttttaaattaagtaaaataccaaagaaattttttttcacaaagaactgaaaaacaaaaattactgccacgaagacatgattttaaaratgaggatrttatatgggatgtatgttaaaaagyaaagttttaatgaatattaaaagatgtttttgaagtyttatytaaagtatgttytaaatgaagtttytgacaggttttttttttttttttttgcattttaccttaaaaatgacaataactgttgcrtagtatacatacaggatacctatgctgaaaaatattggattagttctatccatttgtatattgcataatatttaataagtgttattctcatataaggaaacattttttgcctcaatagttaatcgactttttatattataaataatgcatagtattatraaatttagaaaatcataagaaaaacatgatttaattaacctgaggataaatttaaatatgaaatatggtatacttacaaaataatatgtcaaacgtatatgtttagtttagagaatggtactaaagtgagtattgatgtactggtcacccacccctagaaatagaatattacccgcatagtagaaggcccttacatatctgttcttggatggtcccctcctgtcacacaccccaatgttatagtgaaccactgccctacctacatttgtgttaccttactcttgtttttctttatagttttacatctttataaattgctaggtcttatgtagttttgaaaatatatagatgtaaatatgtgttcctttttcttcactcaactttgttttttaaagattcatccatgtcgactcatgtagcagtagcagcgggccattcattttctctgatatagagattactttgtttgaacatatcataatttaattacccattctattgatgatagacaatcggactcacccctttctccatctctttttttttttccataacaaaccagtattgctaatgaatatttttatacctgtgtctttgtacatgggtataagtttctatatggctgttgatggatcaaatgggtggattgacctatacataccaactgttttccaaagtggttgtaccagtttacactaccattggctatggataagcattattgttgcttgggccaggcgcggtggctcatgcctgtaatgccagcactttgggaggccgaggcgggtggatcacgaggtcaggagatcgagaccatcctggctaatacggtgaaaccctgtctctactaaaaaaaaaattacaaaaaaaattagccgggcatggtggcgggcgcctgtagtcccagctactcgggaggctgaggcaggagaatggcgtgaacccgggaggaggagcttgcagtgagccaagatcgcgccactgcactccatcytgggsgacagagcgagactccatctcaaaaaaaaaaaaaaaaaaaaaaaaaaagaataaaaagaattattattgctctacatagttgccaacatttagtattgattggctttgacatttatatttctcagtagctttaatttgcattttcctgatccctaattaggtagagcatcttttcatatgcatgttgcccatttatgtttccccttctaggaaatgtctttttgtcctttatatttttctattagattgtctttttttcttcaggtttttacaagttctttcaaagagacttcctatactagtccttgatgtcaagacattagtctggtagtaagatgaataaaatgaacttatttgtcaggatagatattgttgccaacttcagtcaggataattgggacagtggcgagtctaaattaaaatttttctctcttcctttaaccattaggattcactttaagagatttggaaactcttccctttggaattgctcttcccatcagagat

SEQ ID NO: 93511 - DNA, 165869 bp, Homo sapiens
tttatagcaaggcaaggaaaaaaaacaatttctatatattgatcttatgttcttaaactttgccagtcactaattatatctagtagtctcttatagattcttttatattttctggatagataattacattttctgtgaataaaggcagtattatttttcctctcccatctataagtatctgtattttttttctgtaccttattgcattagctaggagttctatcttatatgatgttgagtaggagtgttaagagtggattccctgccttcttcctgatcttagggggaaatcattttgtgttttattattaagtatgagttagctgtaagtttttcatagatgctctttatcttttttttttcttcatagatgctctttaccaggttgaggaagtttcttttgatttctagttagctgagttgttgttgctgttgttttttaagtaatgaagggctgctgaatgaatcttgcactttttctgtacctatagaattagtcatacagatttttccttgtttttgactgctgacactgtgaatggcattgtgtttgacgtatgaatgccgaactattcttgcattactagtctaaattccacatggcaataatagcttattctcttgtattttatggataaaaatcatggataaaagacatgaagtaggtagcaattccttaaccatatgtgtgttttataagtcatagaaatttttccatcctaagggaagtgctaactcccttgcttagcatacaatacaggtagcatgtttttggttcctcttcgtttggtcttttaggctatcaaaagtgagtggggggaaatgtaacaaaaatagtatgtactaggcagtgtgtatgtttatcttatttaatctcacttgatggaaagtgaggtccatcaaacaatttgtaccaccaagtcttggagctagtaaatggcagggtggtgggggggcggtcagaatttaaatgcaggtgttttggataaaaccgttattagctcactgtatggtatcgcctctctttggaagtgagtgggtatgtgtgtgcatgtgtttgtgtttgtgtgagagagacagaggaagggagggaaggacaggaattgggagagtgaggtagaaattgagatttggaaggagagaaaagccctcccacctttcattgccatctaaaatctgggcttttagatatcgtgatttgtatctcagctttgccatttacttgatttgtggcacatttgtctctctgagcctcatgttttaaaaatttgaaatgtagaacatttacattgagttttgaggaatacagataatatatgtaaaatgtctcacatagaatgtgctcaatttagtggtgtccattactatcatcattattgatttcctaccattaaatgtattttgtaaatgaaaataatctggttttagaagatggcaaaggagacttagaatgatttctatagttgtttgtttagttcttttgacaaaattgcctaaagttcttttataaaaatggaattcattttgtctacttttcactccttctcaagtcaaaataacacaaggtatttactaaatcagtttgcaaatttggaaaattttaaaaagtactgctgagctgggtgcagtgactcacgcttgtaatcccagcactttgagaggcccaggagggaggattgcctgaggccaggagttcaagaccagcctgggcaacatagcaagacctcatcaaaataaaaaataaagtattcctgaatgctctggacttgcctactggtttggaagtggttatctcagtgtggaggattggagatgccgtttttattttacatggacaacagaccattgctagctaactttagtcccttagcccatgtagatctgacagtttatgacgtgagactgtcttctctaagtgacacaaaccatttcaggttgtttcagtaaggttattttgggtcttacaagcagggcccaagagcttctgtgtgtttcattagtcaagtcagggagatgagaatgagtctgagaaagggcatcagactatcagtgccttggactttgggagggctgttggctccaactctaccaatcaatagccttctgggaattggttcatatgattatttgatttcatagaagtactcttccagccaaaagtgctgcttgacacatgaaaattgtatcttgacaatttttggataataccacaccatcccttgatattgttgaaaatcagaattggtaatcagtatgctttccttctagccatgaagtctttaagtaaatatgttaaacttagagttttattgtagactttgtggttaattatgacctttcttagcaagctgatgtcacaatgtaataagtaagttatgtttctcatatttattcagaagtccaggatgtctttgtgttagggtgatatttaggttttgatatcttcgatttgtctattttccccaattgtatattcagtctgtaaaatttattttactcttttccaattacagtggccacatcttcttatttaattttcaccttactttgtacatcattttagggtaggtcttattgccaccttatgatgaaaaaaataaggctacattttcccaaagatcatcattggacagtgagtccatattcagaagccaattctgatttttgtttatgttctttggattagacctctgggccttgagcttgatctggctctctaaatttcattgatttggttaacattcaaaaactaaatatctaatgactacctttgtcccacagttaggatcaacaaatgtgattagatgcctgtcttcaaaggagttcatgaaataaccagtcggcaagaggcaaagtttgggaatagtttcttctacccttcatacacataaccatctctttctagattgatggagagggttccagtgtccaagcaggaatgaccaggcttcatgaaacttttgagtggctttaactaaaatgttgggccatgaggtgaggcccaaccttgtagatttagtggggcctcttgaggagctacttcgtgttaaacactattctaagattaaagcaaaacaagcaaaaaatatgatttcatccttcaggacctcacaagctagcagacaagatggaagcatacatagaggtgcttccaatttctgctttgccctgtccacccttcgttctgctagcagaacagttttttgaaaaacatgccctttccttgcttaaaactttctggtggctccctgtttctcataggaccaagttgaagtttcttatcaggacatacaaggcctccactgatttggcccagcttcttctacacttccacagcttgcttcaggcacataccactccttggggtgcttagaacccatcatgatttttcatacctctgggtatttatttatgctgagctctctgtatagaatgctgtattaatctgggtcctctgaaaaacagacacacaggattaaattggcaagggtttattaggggaaaatgcatgtggaacagacaatggtgagggggctgagaaggctgggagtgccattagtccttcatgcaagtctgagccctagtgaaggggggataggggagagctggttaggcagaaggtttccagacggcagtgcagtctaaagaagattcagaaaagctattggggagtgcaaagtcagctgttagtggagtcctgcaacttccagcaacagtctgctttggtatccctgctgtactcagtgattggttgggagcacccctttggaggtgtgacttagtacagacactaggatgagtttctgaggcagatggggtccttaatcagttgtgctccttgtagttggagacccttgagttgcctcttggcctcttcttggctaccataaattccttttctctttcgttaaattcctcctgcttgtccttaaagggccagctgtaaatgttttttcttccaaaaaacttttcattgaaggaaaatctcagaatgtccatcgtgatcccacgtcctgccatgatcataccataatctttgcttggcaaatttttaatacatttatttgatttgtacccctaccacctattacaggaccaaaaatctgttaggtactcaggaagtgttcgtttgaatgaatgcattggtagggcttggacaggcagatctggggagaaggtagttgaggcagagggaactgcttaagcaaagccatagagggagaagaataaaggatttacactgtagttaataaatgtcttttttccccaaataagtatatcttcccccaaagctgtcattttagagaaagcctattatgatgcaaaacagtgggggaaaggagtgtcttcctggcagttgaaaatgattcatatttgagaactttgttgaacaatgttttgagtatttcctgagagacttctttcttgagaggaaacagttgatggaaatggaattttactgctgccaggaaaagtgcgataaagataaaatctcatgcaacaactactaccagaatagaaatttccatagagcaaagagatttcaaagtctcagctaatggctcatatgtatttagtattcagtgcagctgaactgtaattctgtaatggaatttgaccaattttgagaagccagtttgtaatgtatgaattagtggagacccatacatcttgacgtttgctgactctgccagatgttggttatatttctgatggaaagaaacagagagctggctgggatcccaaatcttagaattgctaccggccgcctaccactgccacatgttgcagtggtaggagataaacatgctgaggataagacctgaaaaaaaatcactctatatcagcaactggagatacagcccatactccttatgaaatattctactctcgtggcctgggttgaaccatgtatgaggcaggcactccttttagcccaggcccaagtctgctctatgcagtcttcctcatatcttgtttccctagagttaccacttgaaggcattccttattcgtaatgtggtgatgattaatggcacctacctcatgggcttgctgtgaggtttcaatcagataatggatgctgaaggcttagactgtgcctggcatagagtaagtgctcaataaatggtagctagagttcttttattatgcaatagaagcaggactctgagggtaacatcttaatatttccagttgaatgttatcaaagtcagttgttcatgcatttgttaaattatgggccatagcaacccaactctatggacctgggctgctgtgtcccagactgtaattaacacacagttgcttatatctgtcttttcttccaagtgaggacagtttgttatgacttgtagattaagcaaaattacttgcttctccattgtgtgctaacctggtgtagaataccttttcttgtctgtcttatttaccatctctcttactttcaaatttctattataattctcctttagattacatatagctaacttaagaaagtcccagatgtgaaaataaggcgagtgcatgatgtatcccccttcccttgatttttgctgatcaggtggggaatctgacccaatagctcttcttctgtatcctttcttccctttcagtggagtagttcacatgggatattatctcctttacttgtcttttactactaaaacatttcttttaaccatcttcctcctttgttttccaagttttgcctgattacatcaagaactacctcctcctcctcctcctcctcattctatcccatttgaaagccaaacacatgaattgaattgtaaatggtaggaaatagagtattactattgagagatgtgtaccaaggcaaaggaaagccatacattaaaatgagcaaggggaaagtagtatttgaattcccaaagacatctcatactcactatgtccaaatctgaaatcactctctatcttctttaagccttctcctgctaaagtcctctggaactttgtggcagcctactctcaagatgtttcaccagtgggtttatttcattcttcttactcctactattcttgctctgggcctggccctcatcatctttcatcttgaggtaataacttctttcctcatctttttgtaccctctctgccctggatggcctatatagtggcaaaagaaggtgttttttttttctttcctttttagcttttttattgtaaaatgagacaagaatttaaaaaatcaaacaaatgtgtagcttaatacaatattacaaggcacacatacttgaaatcaccatccagatcaagcaatagagctttgtcagccaccccagaagtccttccaggtgccctctcccagtcaaaaaccttctctccttctgaaataaccattatcctgacttttaaagtagttatttccttgcatttctttatctatagacagtgctatttggaaacaccagtcttgctgcatccagttgcctctatgccaaagtctagaggtgcgcaaattccctaatgggtattcttttttgaaaaattattttaaaatatttaattgacaaagattgtataaattgaaagtgtgcagtgcaatgtgatgatttgatatacatatatattgtgtaatgattatcacggtcaaattaattaactcatctaataccacccatggtgtacattagagccccagaacttgttcatcttctatctgaaaatttgtgccatttgattattttcctatctcacccccttatctctggaaaccactctttgtttctgggattcagcttttctaggattccacatataagtgagaccatatagtatttgcctttctgtgtctggtttatttcacttagcataactgtcctctaggttcattcattttgttacaaatggcatgattttttttttgtttttttaatggtgaataatattccattgtgtaatatataccacattttctttatccatttatctgttgatggatacttaggttgtgaccatatcttggctattgtgaataatcctacaatgaacatgggggtacagatatcccttcaagatactgattttatttcctttctctccggccctcacaggttttctcargcctacatttatagtctcctgttttgttttgttttgtttttgacatgaggtcttgctctgttaccaggctgaagtacagtggtactatcgtggctcactgtagcctcaaactccccaggctgagcctcctcccagctcagcctcctgagtagctgggactacaagtgtacgctaccatgcctggttactttttgtatttttttgtaggacagagtcttgatatgttgcccaggcttagtctcctttctatgattccccctcccctccccctagtctctgtccgtaccacgctatttataggctgctagatacctcaggtacctcttggtgtttgccagatgcytctaggtattggctcctgttgttccctttctgaagctgccgctcttccattcactggtgaaatcctagacccaactcaaatgtcatttcttctgtggtatgctgccctggatcttccttctctgacgtacctggggtagaacgaattcttcccgtccctgtgttctgtgtccattatagcattttacacttgcttctattgttagcatttttcagtctttggtacctaacagattttttgtaggtgctcaataaatgttctttgaatgaatgaatctatgtaatccatagttaaaggtctttcagggtgtcagattttcttcagaatcaacaaaaatatcttgttttgattttcacacaaagttaaaaacatattaattttattttctgtccgtaactattattgccaatatttggctttactaactttgtrtgataaatatttgctattttggccacattattggtaaaatagacctttgtgggcttttctggctacctgcacaccatttttattatttcaagggtaacaataattattgagtacaacagtgtgccagacattgtgctaagctttgtctgtgcattatttgctgactcatcaccctaatcctttattattttcattttacgtgtcagaaagtaaaacttagagaagttaaatgagttaaagttataacgctaagaaagggtagattcagggtgcaaatctaggcagtctgactataaatgtaaaacccattttttttagccattatttttttgtttgttttttcctctttgagacagagtctcacttgctctttgtccaggctagagtgcagtggcatgatctcggctcactgcaacctccctcttccggtttcaagcgattctcctgcctcagccttccaagtagctgggattacaggcacgtgccaccacgcccacctaatttttgtagtttttggtagagacggggtttcatcacttttgcctggctggtctcgaactcctggccccaagcgatccacccttcttggcctcccaaagtgttgtgtttacaggcatgagtcactgggcttggccgttttttaccattctgtgttatttcttattaagaaagataatagttctcagtagccaacagtggacttttgcaaagcatctgtggagcacagctcatttgtggaagtttgctacccactgccgcactgggacgcaagtcaattctttaacattttcattcccccttccctaaattgcttctgtgcaaggccctgtccagctctactgatactaggtgtgtatatcttgtggtgaatgggtggcagcttggttaatgactcttggtgagccggaaataacaaggttgctcttatattgacatgtctcttcttagccgcatatattatttagcttacggctactgtcttaagggttatcatcactataaatgatgtgttttgtgcctggcaaggtcataagttgtgtcttctaaaatgatattggtcataaatgttaattgctacttcttaacttccctttgaggtgttacaaggaaatccacgtatgaacaactgaggaagcaattaagcagaagaacagcagcacaggaaaatccaatagttggtactgcacataggcccctgggcttacagaaactcagaccaggggccccagaggaattgcctttgaaatagcagcagtggaggctcagccatttggggaatcattgatggtcattggtagatggcacagacgaatgaagtctagtctcacatgagtgtttgtcctgtttccctcattagcatgtcacttttccaggtcagaaattgtagtctctctttggttgagccctgtgccccttaatactgcccagtcctgcatatggcatagatatggcattgttcacctgcaggcatttcttgtctattttaaataaccctcttactgcattttggttttttaagtcagttttccatttaagcaaattgccaaggtttatctagaatttttggttgtgtaaaacttagctgcagcagctaacattttctgttcctctagcaaatgccaggtgctgtttaaaacactttctacatcgttacctcctggagtcctctcaaatcctttgaggtaggtactgttattctccctgctttctagctcaggattaaaattggcatcacttgcagcttagaagatttcttgttataaataaagaaatgtgttagggagatgtggtgatgcccacctgtggtcctagctacttgggaggctgaggcaggagaaaccyttaggctcaggcgttcaaagctacagtatgtgatgatcttgcctgtgaacaggcactgcacttgtgcctgggcaacatagttgagatcgcatctcaaaaaaaattgttgtattgggatttcagccgcactttctgcctaaggtactgccttgtttggaaagggtacttgacaaacatctgtgtggctgggagggtgcttctagagatagtgatttttctctaggatcagttatataataattttgggaaaaaacacaccatttttgttttgttcttgttagagaagtggctgtagcattttctttcaatggacactttatcaacagcttttctaggaagttttattttattgtttttgtgggggtgagcttcaagactatatttgctgttgtttcttttcccagactaccctacttcctactgtagtgtaagtactgtagaaggatttagtaactgaaggtcagcagtttggctcttttgttaattcctgatgctgcagatgaagtaatgtgttttcttgtcagataaaatgtataaggctgctactcagcttgacaggaagaatgagctagaagtacttctcaaagaaaaacgtctcagataacttctgacttttcctttttcacttcctaacgttgttctcctgtatcctgctctactcctaagaaggtatgtgatttgggcaattcatttaatctccctgtacctcagttcccttatttataaaatactgaaaacaagcaggttcctstaacaattttatgagataatatctgtatagtacacatcacagggactggaatatagaaagcactcaataaaccttagctattattagcaaccacttgaatataaaaatgtacacttattcaggggcctgaatgctctccaggttcatgctccaggagtattgtttttttattttttattttttttgagacagggtcttactttgctgcccaggctggagtgcagtggcacaaacacagctcactaaagcctcaaccttctgggctcaagggatctttccacctcagcctccgagtagctaagactacaggtgtgtgccacctcgcccagctaatttcttttttcttttttttttttttttttgtggagatggggcccaggctggtcttgaactcctgacttcaagcgatccgcccacctcggcctcccaaactgctgggattacaggtgtgaggcactacgcctggccaaattggtgttattagtctcaaaaggaaacctaggttgatatcctgcttaccctaaggaaggttcttcagaggtgttttactgttcttggctaaagagcataagaagggcagtaactaaaagaactttagtggccagatgagaaaccaggtagttactggaaatagatattataatatctaaatttgtgcaattttattctgagaatatgacatttggtttcatcttcctacagtggaaccaaatgaatgggtaactaaaagtggtgtgatggagaggattgagtcctaaatttgtgtagtatgctcttccatcaaggattgagattagggggaggaggaggtagtaggtgagggaagaatatttaaataagatgagacatttggctggtcttggaaattgatgtcaagattcatgccccacctgctagtaaagttaatcaagaccagataaatcaggaagcctcactgtagagcagatttcattcattttacctctcccttcctctcctcaaattccccacattgtgtctgattatagccagatatggctgggcgttctaagcctcacctccggagattggtattcactaagtttggcctgacacacagagctctgcattttgaacaagttccctggggatgctcctgcagaccttctcagaagcaccttttgagaaaacctggattcaaattaaggcccacatatcgccataattggtcagtctggaattagcattgagttttrgcatctagccacacacattcacttgtcctcttgcacttttgccaaaatgggaacaaatgcatttctctttagtttgggaaaatcaactttttatattaatgtggttgctaataatagctaacgtttattgagtgctttttatattccagtccctatgatgtgcactgtacaggtattatctcacagaactggtagaaaaacctgattgtgccaggcgcggtggctcacgcctgtaatcctagcactttgggagtccgaggtgggtggattacctgaggtcaggagttcgagaccagtctggccaacatggtgaaaccctgtctctgctaaaaatacaaaaaaaaaaaaaaaaaaaaattagccaggcatggtggcacacgtctgtaatcccaggtactcgggaggctgaggcaggagaattgcttgagcctgggagacggaggttgcagtgagccgagatcgtgccattgcactccagcctgggtgacagagcgagactctgtttaaaaaaaaaaaaaaaacctggttgttttctatattctgtaaataaggaaactgaggtgcagggagataataaatgagttgcccaaattacatagctgcttaggagtagagctggaagtttatccaaacaacctacttgaacctgtactcagtttttgttcttaattggtctcgggtgcatggagttgttggctgcactttaactgctacactgcactgtctttggagccaatcaacttttttttttaatgtttcagaaacaagccaatttacttaaaattttttttttttaaattgtagtaacatacatgtaacgaaatttaccatcttaaccttttttttttttttttttttttgagttggagtctcgctctgttacccagcctggagtgcagtggtgagatcttggctcgctgcagcctctgcctcccaggttcaagcaattctctgcctcagcctcttaagtagctgctattacaggcacccaccaccactcctggctaatttttgtatttttagtagagacctgtttttgccatgttggccaggctggtctccaactcctggcctcaaatgatccgcctgcctcagcctcccaaagtgctgggattacaggcgtgaacccccatgcctggcccatcttaaccatgtttaagtgtactgttctgtggcattaactgcattcacactattgtgcaaccatcacaactctccatctctagaactcttgtcatcttgcaaaacaaattctgtattcattaaacaataaacttcccgttttcttttctccccagcccctggcaaccactgttctactttttgtctctatgacaaagccaatcaatttttgtgttaagtgtataccattaatctctacagccagtagctttctattgaattttttagataaaaaaatttacaagtcaaaccaggatttataaacatatactcagtattgaaacaagaagccatagacattttaaatagaatttagcatgtctttaaaaatgtgtaattgtatcttttaaaggacttgaagtcygctccactatgtaatacaactagattaatatttgataacttacacataagaaagctgcactgaaaggaaaaacaagccctattgctgggtggttcctttatgcttgagaaagcagtttctttggaaaataaatacatttgtgatcacatgaattaatgcaaattgctgcatcaggctaaaaatccattatgctcagtaactttaatgagattgtacattttgggatgctttggacagagcaaagcaatacatattaaaagggctgattttgaaagctgaagccccacttttcctcctgtcaattttttttaagttgaattgcctacaggttactaatatttagaaagctgatttgcgaagctggaaaccatcattctgagcaaactatcgcaaggacagaaaaccaaacaccacatgttctcactcataggtgggaattgaacaatgagaacacttggacacagggtggggaacatcacacaccggggcctgtcgtggggtggagggaggggggagggatagcattagggagatatacctaatgtaaatgacgagttaaggggtgcagcacaccaacatggcacatatatacatatgtaacaaacctgcacgttgtgcacatgtaccctagaacttaaagtataataataaaaagaaagctgatttgtgtggttacacaggtataatagttttatttcaagcttttgaagrtacagttccacccctccccccccccacatttttattttatctttctgggaaaatcctgaacctagaagcttcttttataaactttgttctgtgtcagatcattaatttgtaagcttgatgtagacaatttcagatgctgttattattctgaaatgtactatggttgttatcaatttttagctgtttacacaaagcattattatgttttaattttttaggctatcttaaaatacctgaattgtgtcagccaaatagggactgaagggtgctttataataacttaaaacttagatccttttttacctaatgataaaatcagtaggagtgtattttttcattcagggtcatctgtctctttgattctctttcatttacattgtatgtaatcaggatatatatgattttaaaaatttgacaattagtcatgaggatttgttttaaaattaaaaagtattatatgtggttaaaaatttttaaacaggtcgggtgaggttgctcacgcctgtaatcccagcactttgggaggccgaggtgggcagattgcttgagtcctgtagttcgagaccagcctgggaaatgggaaacatggtgaaaccctgtctctacaaaaaatacaaaaaaattagccaggtgtggtggcacacacgtgtagttccagctactcaggaggctgaggtgggagaatcacctgagcccatggaggttgaggttgcagtgagccaagattgcaccattgtactctagcctggacaaccagagtgagaccctgtttcaaaaaaaaaaaaaaaaaaaagcgggggtggccaggcacagtggctcatgcctgtaatcccaggactttcggaggccgaggtaggcggatcacttgaggtgaggagttcgagaccagcctggccaacatagtgaaaccccatctctaccagaaaatacaaaaattagctgggcgtggtggcgcacacctgtaatgccagctactcgggagctgaggcatgagagtcgcttgaacctgggaggtggaggttgcagtgagccgagatcacgccactgcactccagcctgggcagacagagcaagactccatctcaaaaaaaaaaaattacagaaagtgtaaaaaagtttatatccacacttcattcaaagccctgttcagtttcttatctagactttcatatggtttttatgtcagtctaagtacacacacacacatatacacagtgcgtgtatcttttttttttttttttttttttgagacggagtctcgctctgtcgcccaggtcggactgcggactgcagtggcgcaatctcggctcactgcaagctccgcttcccgggttcacgccattctcctgcctcagcctcccgagtagctgggactacaggcgcccgccaccgcgcccggctaattttttgtatttttagcagagacggggtttcaccgtgttagccaggatggtctcgatctcctgacctcatgatccacccgcctcggcctcccaaagtgctgggattacaggcgtgagccaccgcgcctggccgcgtgtatctttttatacacagaagaatcatacaattcttaatattcaatttagtttttaacttactatatattacaaattatttcatatgggtatttacgtagctactcataaatagatgtcccacagtattccaatgtttagatattccgtagctcatttaaacagtcttctcctgagggacatttggattatttaatttgtttgttttactattataaacagtgctgtcaacagacatccttctacatttttgtttactcatgtttgaggaatcacataaaaacttttttaaagaaaaattggagtaatgatattgaaagtttatacattttgctgtttgatagttcctaattttaaaaaagccagtgtaaaaataacatttggaacaataaaaatgaaaaccagtatcatatacttgaacatagataactaaacatacgtgtaaatattttgaataattacagctatcatttaatgatcaccaatgtactgtatttacttctcacaacactatggggtaggtactcttttaaaaaatttttaaagcagctttattgaattataattgataaaactgcacatatttaatgcatacaatttgatgagtttgtacatatgcatacacccatgaaaccactacaactaaagtaataaacatatctattgcctccaaaagtttccttatgcttcttctggtttgttgttgtaagaacatatgacatgaagtgggatcatacagttatttgtttttctgtgactggcttatttcatttagcaaaatgtcttccaggttcattcatgtcacaatgggaggatttccttttttaagaccaaatggtattcattgtatgaatatatcacatttccttttttttttttttttttgccagtctagttttacttattatctcttcatttcccacgttcaccttcccagaacttattatattatattattattattattattattwttttgagacagagtgtttctctgtcgcccaggctaaagtgcagtagcatgatctcagctcactgcaacctccacctcccaggttcaagcgattcttgtgcctcagcctccccagtagctgggattacaggcatatgccaccatgcccagctaatttttttttttttttttttttttttagtagagagggggttttgccacattggccaggctagtcttgaactggcctcaaccgatccacccaccttggcctaccaaagtgctgggattacaggcgtgagccaccgcgcctgcccccataactaattttaaacaatttctaaacatcatatgattctattcataaacacttcagctatcattattatttaacataggaaatattaacatatattatgggtacaaatgctataatatttaaagcacctttatgttatgatattaaatgtaaatatttgtttaaattcctggctttccttggttcatcaaatcaggtaataaattaaccagacaggttccaattcaatcagatacgaatataccacgttttctttatccattcatctgtcaatggacatttgggttgcttccttatcttggctgttgtgaatactgcttcaatgaatatggaagtacagatatgtcttcaagattctgattttaattttgtggtgatacacccagaagtgggattgctggattgtatggtaattctatgtttaattttttggggaaccaccatactggttttcatagcagctgcaccattttacattcccaccaacagtgttacaagggttgcagtttttccacatcctcactgacacattttatcttttgatttttttgataatatccattctatcaggtctgaagtgatacctcattatggttttgatttgcatttccttgatgattagtgatgttgagttccttttcatttacctgttggccattgtatgtcttttttggagaagtgtctattcagttcctttgtctattttttaactgggctatttggttttttgctattatgttgtaagaatttcttttttgttctttttttttttttgagacggagtctggctctgtcacccaggctggagtgcagtggcatgatcttggctcactgcaacttccacctcctgggttcaaacaattctcctgtctcagcctcctgagtagctgggactacaggcgcaccgccaccacgcctggctaatttttttttttttttgtacttttagtagagatggggtttcaccatattggtcagactggtcttgaactcctgacctcaggtgatccacctgcctcagcctcccaaagtgttgggattacaggcttgagccaccgcgcctggccaggaatttcttatatattttagatattagccccttgtcagatacatggtttccaaatattttctcccattccataggttgcctattcgttctgttgattgttttctttgctgtgcagaagctttttagtttcgtgtagtcctacttgtgtatttttgcttttgttgcctgtacttttggggtcatatgcaaaaaaatcattgccaaaaccagtgatttatttttatgttttcttataggagtttcagtttcaggtgttacatttaagtctttaatccattttgtgttgattttcatgtatggtgtaagataaaggtccagtttcactcctttggatgtagatatgcagtgtgtccaaaacagctcattatcatctccactcataaatctggtttttctgtattccctttctaggtgataatgtccccatttactctgtcatttaagcaatacacctctaagtcttttcagttctttttttaatctctcttaactccttctcctcttccattctcatggctgcagctttggtccaggccctcaacagttatcacctaggtaaatacagtcatatgtgccccagtgtagcttgtccagccttgcctcttgctatctttttcctcatatgtttttcttcagcaataggtgaactccttgtgggtcactcagtcaccccattccatctcctgcccttgggcctttgcgcatgctagctgctctgccagatcctccctcttacttcttagcctgtttaacccctactcatctttgaaaggcttgcttcaggcatcacatctaggaagtctctgctgacccctgagtttgggcttaggcactctttttcctcacacttgcctgtagctcctctgatgttatattcaccacactgggttataatgatctatttgggtgcctgtcttctcttctggattgtgaattcttggagactgcagccatggggaaatctattgcatttttctgtgtgtgaatgggagtggggtctctcctttagtcataatgtgtccttctcagggaggccttcctttgtaaccctatctaaaattgcaacctcccccaacacttcctatcccccttccttgatttattgttctccttggcacttattgctgtctaccatactatagattttacttatcttgtttattgtctgtctcctcccactagaatgtaagcgctatgagggaagggatttttgtctttttttaaactgttgtgttctcactgcctaaatcataccaggtatgtagtaggcacttagtgaatatttgttgaacgattcaacaaattcagctgcctctgatagtaaattttgttttgttttgtttttgaagacagggtcttgctctgtcgcttagtctggagtgcagtagtgcaaacacagctctctgcagcttcaaactcccaggctcgagtgatcctcccacctcagcctctcaagtagctgagattacaggcatgcactaccatacctggctaatgttttttgtattttttgtagagacagggctttgccatgttgcccaggctggtctcgaattcctgagctcaagcaatctgcttgtctcggcctcccaaagtgttggatttataggtgtgagccaccatgcctcgccagtgtattgttaagagtgtagtgtttggagccasactgttagacttcagattcttccggcgtctttttttttgtttgtttttgaaacagggtcttcttctgtcacccatgctagagtgtggtggcacagtcgttgcttaccacagcctcgacctcacaggcttaatgtgatcctcccacctcagcctcccgagtacctgggactacaggtgtgtgccaccatgtccggctacttgttttattttttgtagagacggggtttctccatgttgtctagactggtctcagactcctgaactcaagcgatcggcccaccttggcttcccaatgtgctgggattataggggtgagccacgatgcctggcttcctgaagctttttatctgtgtgatcatgggcaggtcacataatttctctgtgtctcagtcttttctgttttttttttttttttttttttttgagacagagtctttctctgtcacccaggctggagtatagtggtgcaaccttggctcactgtaaactctgcttcctagattcaagcgattctccttcctcagcctcctgaatagctgggattacaggcgcgcatcaccacacccagctaatttttgtatttttagtagagacagggtttcactatgttggtcaggctggtctcgaactcctgacctcgtgatctgcccgcctcagcctgccaaagtgctgctattacaggcatgtgccaccgcgcttggcccttttctgttttaaaatgggactaatagtcatctttactgcacagagtaaatagttctgtataacatattacaagattacctggtatgtggtaaacattgaaaaagtattacttgtttttattcctgacttggaaagttggccttagagatgtgtttatcttggcatttccagagcctggcctggtagtgcacacctgaaagtatcaaataattctttgtaagataaatgtttaaatggaatttaagcagatttttcaaaactattgtttttgtcttatttatttatttatttattttttttggggacagggtctcgctctgtcacccaggctggagtgcagtggcacgatctttgctcactgcaacctccgcctcccgggttcaagcgattctactgccttagtctccgagtagctgggattacaggtgcacgccaccacgcccggctaatttttttgtatttttagtagagatagggtttcaccatgttggccaggatggtctcaatctcttgacctcgtgatccgcccgcctcggcctcccaaagtgctggaattacaggcgtgagccaccacgcctggcctgttttgtcttctttaaattagtgttttggatttttgataattaatcatagcagtttgtatttaaattagatatgtgaatacctaaaggacaaaatcttaaaacatcctgtttttctttttttgagaatctcacgccattgcccaggctagattgcagtaacgtgatcatggcctcgaccttctgagcttaagtgatcctcctgcctgagcctcccaagtagctgggatcacaggcatgtgccaccatgccagtttaattttttttaattttaattttgtagagatgaggtcttgccatgttggtcttggactcctgggctcaagcaatcctgcctcagccttccagagtgctgggattataaacatgagccacagtgcctggccttaaacattttagacaaaaatgggaacttttgagctttgactttgattagacacagtaagcgcactcatgttctaaggctagaagctcctttaattttctgtggaatgtggatactgttgtagaattccaggctgtgcttaagctagtggatctgttccactttttaactccttgcttcatttttaccagctttagagccctatgtctttgtagccaagaaagaaattagtctaggcctgtaaagactcacatctagttaagatagacaagtcttcagttttcagtaatatgttgcaaaaaaggcagaaaactactcatcttggtttcttggaaagtgaaactgtatgtgtactaagctccatctgtcaaaagtagtatttaatactttttccttagcatcttttcagaaaatgggagcgtgggtgatggtgatggaaattaacatttacggagtgccaactatgggccagacactatatgtatgttattttgtttaaaccttataggaatattgtatgtcccaatttacatataaggacactgaggcacagaatggctaagtaacttggcaaagatgacatatcttgctagtaagtagcagagccagtgttttgatctaaaatcttttttactgtcactttccacatctgcyacacacttgaacaagaaaatgtacagttgtcattcatcttgaatgttgataatttgtcttattgtcaggtttttgctactttcaaaaattggcacaaaggtaaaagaaccttgcatttcttgaagttgagaggtttgtggttccatttgtaagaagttaaatcctaaaaatacactgtaaagtatactaaatgagcaaattaagcattaatagctgtaaaactgtacatttatattatacatactgatttatgtaatatataaactaaaaattagaggtgtgaaggatccttaatatggtcacatatgtttcagttatcctaaaatactttttttgctaatactcttttcgtttttcttccttttttattttttgaggcagggtcttgctctgtcgcccagactggatggagtgcagtggcttgatctyggctcactgcagcctcaacctccagggtgtaagcaatcctcctacctctcagccttccaagtagctggaactacaggcacgcaccaccacgtccagctaatttttgtactttttatagtgacgaggttttgatatgttgcccacgctggtctcaagctcccaggctcaagcaatccacccacctcagcctcctacagtgctgggattataggtgtgagccaccacacccagcccactaatacttgattcttaaaaaatattttaagaatgttttttcttatggcttcaacattctttggaaatgtactttccatcagtaaaatgttcctagtttctactctaactctggagcagtatttgtatgtgtcatcaattgtttaaatttgaatcaagcatcagtaatggcataccatttgggctgctttgtggccctgatgaatgctattttattttatttattttttattttattttaattttgaggcagagtctccctctgtcatccaggctggagtgcagtggcccagtctcggctcactgcaacctcctccccctgggttcaagtgattctccttccttagcctcccaagtagctgggactacaggtgcgtgccaccacacccagctgatttttgtatttttagtagagattgggtttcgccatgttggccaggctggtctcgaactcctgacctcaagtgatctgcccacctgggcttcccaaagttctgggattacaggtgtgagccaccacacctggcctgtgaatgctattttaatatagttctcaggaatgattaaaaacaaatgtgtttttctaagtggtagaattaatagataaaatcactttgaaattaaagtcctcaggtaacatagaattcttttccctgaacaagtcattatgtagcacatggtataattttggcagacccaactttattaccaacaaaactgtaaagcgagtcctatgtcctgtttgtcttttcttctcgggggtttctgttcttactagaacaaatcaaagtacagtgtgtgttgctggtcttcaagaattattagtttttgttgtaactgtttaatgcagaaacagatgctagagcagttattccccaaggcaccatgtgcctaaggcatttttaaagcactagtatgttttcagtgtgatactgctactctggaagaactgtatacatagtggttcacttttccagtgtggttagaactgacatttctaagatataaagaaatttaaggccaatttggatttgtactctggctctgcttcctgcttaggtggaagactttgagtgatttagttatsctctctgcctctattttctcctcttcaaagtggggatgatgaaacctactttataactttgctgtgaggatttgtttcggaaaaactctcaaatcagctctgctctcacaccaacaacacaacaacaatcaacacagaagacttccgtgacaaaatgtggggattttttccaatacactaagcagtgaacaccagctgtgtcctctaattcaattttgacaccatctttctggagatagcatcagatcccacaggtagagggcgcagtccccaaaattgccccctctcccaggcaccagttccaagtctgggcctctgcaacttctgaccgaggagcttcaagttgaggttcccatgaacctctccttgggtttgattactttgccggagaagctcacagaactcagggaaacacatttactggtttattacaaaggatactgatgaaaaaatgtgtagggcgaggtatgggggaaggagagtggagtctccatgacctccctgggtgtaccaccctctaggaacctacatgtgttcagctatccagaagccctctgaaccctttctgtttgagtttttaatgtattttatctaaatacaaccatgtagaaatgtgattggacaaaaagctcatgatctaaacccagcaaggcttgtctgttcagacttttcttggctactctgtgtagcattccttcccttagggtatgggacagggtcctctttggaatgagtgtctgttgataagagtcttcccttgggcaggtgaaaggaagacaggagagggtcagagagatctgtttcctgaggcctaaagtgccccaacattataacaacagattatgacaagggttatggaagttatgagctagaaactgtggatgaagagggtgtgtgtgtgtgtgtgtgtgtgtgtgtgtgtataacaggattattatctaggactacacgaatttgatttgtgcatttgcttaagacagtgtaatactgtgttaggtatgcaggcttgagagtcagtccattgagatacaaattttggcttcgctcctttttagtcacctgaactaggatcacccacataacctctttgtgcttcagtgtcctcatctgtaaaatggggaaattaataactacctacatcacagagttgttacaaggcttaaatgagtcaatacatatgaaatgctttgaactccacctggtaagtcttcattaaatgttaaatattattaatttctttaatattgttatctccacttgtcagcatgctatgtcaacattcattcactatgttcactaaactgagacttccttgagaacttggccaaaatcagtatttgtatctcctgaacctgacatatttgtacttaatttaaaatgtttatgaaatgaataaaatagtgagggaataccttcatgcttctcagatctactctttttcttctttccatttcctttgaaactaatctttctcacgtgactcatatcatatttgaagctggactgtctatgttttctagaacaaaaatttgggatacttggtctaaaaacagattagtcttgttaaggctgccgtactacttatcacagtcccatattctgtgtctcattagatgtatttctcctctcctacttcttcctctctggtccccaacacacaatgtagagtctggggcattggggcgtagaaatgcttgataaatgattattgacttgagcaaagagtctacaggggtgattcagggcatgaattaaccttcctcatgctttgatctcagatggaaatagagctgctcattcacaccagtgatggtttcaaggttattaggagctgcggtatctgaatctggcttctttttatttttattttttctgagacggagtctcgctctgttgcccagactggagtgcagtggtgtgatctcagctcactgcaacctctgcctcccgggttcaagcgattcttctgcctcagcctcacgaatagctgggattacagatgtgcatcactatgcccggctaatttttgtagttttagtagagatggggtttcaccatgttggccaggctggtctcgaacttctgacttcaggtgatccacctccctcagcctcccaaagtgctgggattacaggtgtgagccactgcacccagcctgaatctggattattttgaagtaacacatttcgaacctcaaatgaggtacaggatatatgagacccagaaacaggcatttgaaaatattctgctttgtaaaattagatatccgtgcttttcttcaagggtattcttttctcctatctcttaaaacctgtatatctgtttttttaaattttctatttcaagtcctcaaatggtaaattagattggaaataattcattggtaagttgcagtcactatgcaaggagagttggcataaatggtgcagttttactcttgctgcatctctctacctatagcaacatagaaatatcttttctaattatagtcatgaaaagtctaatgaactctattctgttttaaaaaagccttttccattttcttttgttaagcactttcttttcttttttttttttttttttttttgagacggagtctcgctctgtcgcccaggctggagtgcagtggcgggatctcggctcactgcaagctccgcctcccgggttcacgccattcttctgcctcagcctcccaagtagctgggactacaggcgcccgccactacgcccggctaatttttttttgtatttttagtagagacggggtttcaccgtttttagccgggatggtctcgatctcctgacctcgtgatccgcccgcctcggcctcccaaagtgctgggattacaggcgtgagccaccgcgcccagccaagcactttcttttcatttgtgccatatatattgttgaaaattggcatttatatacccttctggctttaaacaattggttccattttccatgtaactagacacaaatgcattatgcaaaattgtgtttgtaaggagagatcatccttcattccgtttcataaaggttttctcttttttactgtttacgtgagggttgaatatgtctgccttctggtaacacattaaggttgcaatatttgtctagttgtaggaatacttagctcttttttgtttgaatttgacataacacatgggtaaatctaatcctgatggaaagttccatttaatttttttataacaacttttaattgacacataatgtatttatggggtatagagtgatatttcaatacatgtatacaatgtgtaatgatcaaatcagggtgattagcatatccatcaccttaaacatttatcatttctttgtgttgagaatattcaacattttctcttggctatttgaaaatatggaataaattattaattgtagtcaccctacagtgctatagaacactgtaacttattcctcctgtctagcagtaattttgaatccaagagccatccctcctgcctatccttcccagcctgtagttgccgctattctgctctctacttctatgagatcagcttatttagaaagctccctttttaaacacataaaaatatttttgtagtgtaaaaccaatatatgtacactgtaaaaaaaagtttgtcttaatcagcttaacatatgtttgaatttaaaaaaaatgtaattatcttaaagtttcagtttctaaaatcaaagtaaagtactaataccagtgcttcctcatgtatactcggttgagtttcttttgggggtgatgaaagtgttttagagttagattgtggtgatggttgcacaatgctgtgaatatgttaaaaaccatggtattattaaatgagtgaattttcatttagtatgtgatttattaataaagctgttttatgaaaagggtactcatatcactatgaatcagctctatcacttagtagctggctgtgtaataaccttggattaagttgctttcatttttttgtgccttggcttcctcatctgtacaatggggataataatatcttttttgttggttggttgtgaggactaaatgaataaatacatgcaaagagcttagaattgttttttgaaacataaaccctcaaacgtcagtggttgttattattcttatattgcatgtatagttcagaagagaagtctggggctgtagatacacctttttggtgtgatcaacataaagatggtaattaaagccacacatgtggattaggaaacccagggagaacatgtagaatgatgaaggacagagagctgagagccaaatctagagaaatagcatcatttaatatgggagcaggacaagcatatctggcaaaggaaactgagaagtcatgtccatagaggtgagacaggtgtagtgttagggaaggaaaggaaaaaattgtcttccaagaaggagaatatggctaatagtgtcttgctaaagagagtttatcttagtctaatttgtgttgctctaacagactgggtagttcataatgaaaataaattgatttcttaccgttctcaaaggccgggaagcccaaggttgaagggcctgcatctgccgaggtccttcttgctgagttgccccatggcagaaggtggaagggcaagaaagtttgagagagcaagagggcaagagcaggagggagccaaattaatttttataacaacccactctaacaataatctattcatgagggcagagcccttatggcctaatcacctcttaccatcctggtcccacctcttaataccatcatagtggcaatcacatttcagcatgagttttggaggggatatccaaaccataactttctgttcctgaggccctgaaacccatgtccttctcacatatgaagtatattaattctaccttaatggctccaaaagtttttttttttttaatttaaaaattttctttttaattctcagcaaggcaaggtacttctatatagaagggtgcgcccttacagatggaataatggtgagcgtacacttggacaagggaggggaaggggttcttaccctgacgcacgtggcccctgctgctgcgttgttcccctattgggtagggttaagaccgcacaggctaaactaattccgattggctaatttaaagagaatgacaggatgagtgctttggcgggaatcagggcagagcaggtagcaggtaatcggaatgagttagagtggagcaggtgatcggaatgagttagggtggagcaggtgatcggaatgagtcagggtggagcaggtaatcgaaaaagattctttacgaggaagttaagtttaaaagtagaaggaaaagaattgaacacactgacatattaattctttgaaaagaaatttagaactcatatctaacagcccctccccttgtatttccttacagctttcttttcaaacttttaacatgtcttagcttagttgttttgcttgattttctaaaagaagaagcttctctggataaggtggaggatagttaagggaggttttagtaagtgctatttttatgagcctctgcatcaacttacgggtgcatggtatgacacagcacccgacaagattaagtacactcattatggctgtgagagaaataagaattgaggctattatttctttccgtttaccgaactacttttctagccatcctgtaaagaggtcatttacccctgagttgctggctgactcattggatagagcagtcagaccttgcaatgcctttgttatacttccattaggggtggtggtgtttgggatgaagtgcaacattgagttttaatcatgatgcaaactcctcctctttctgctaatatcatgtctaaggctgtcctattttcccaagccatctggctagtagcccctaattgttcagctattcctttaacagcatctctagtgtagttaataaatcactgttggttgtaatagatgtagtttatccaatctacatttttattaactgtcacccaccaaaatattgacaaatcctgcagctatttgatttcgggctttaaattgatctggtattccccgtgggactccaattgcatctaaatagacgtgagagtcaaaagacccataaggtacttctctcgctttatgatgtcttatttttcctcctcctggttgatgaaatgccagggtgaaagggatagccaattggactaaagcataagtgccacttcagttacttggcagagtgtccagtaaaggtccaccataataccactacacatctgctcagggatgaataaaggctgactgattggtaagcttttgacaattcttaagctcactacatcccttcaggtctccaaggagtgataagtttcctccctgtcaagggagacatgaagtgaacctagtgttgggagacggaagctggatggcccttgggggctgacccgcagggtgccgaacttcaagatatagcagagagagagcttggcacgacttattactctaggctgtagaatcctggaaaagagctaccatgcagtccacgcctggtcgactggaggaccaccctagtggaaaggggacaatctgggcctctggcctgccgtgcgcacaagaataacaattgctttgttaaacgtgtggtcggaatttttgatccattccaaccaggcatttgcatcttggtatcctgtcttaattgccaaagtttgttttaagtctttaacttctatgatcctctcgtaaaatgaatatatggttttaggaaattacaaaaaccaactggggcagtccacccttgctctttagtggtccacagaacactggaccaactacgatataaaggtctacatcggggggcaagcctcctggttgacactggggtctttatcgaaatctccccagattaaatggtcccaatttactaatgtccagtctgaggagagtcaggagggacagaggtacttttctgaagtagagagctgtctttgacttggcaagtccccacagggtttaacaaggcaagcattaaatgcaatagtttgaggcaaaattgacttggttatgttaataactaaatggtcaggaatagagcgaggaaagaagaaagagtaatagatagatgaaagagttaaatttttcttagctttagtttggtagggttttctcctgggactagggcccacaactctggagggggtggcgctttcttgactcgggtatgatgagtccatcccttttttgctgtacgaacagcggtggttagcagcacaaggtagggtccttcccaggctggctcgagttttccttcttttcaccctttgatgagaacgtgatcttcaggctggcgctggtttaccggaaattctaggtgtggtacatgtgctaaaagacttttagttttgagggaaaggaaagtggaagataaaccaagtatataatttctaagaaactgaccttttgttttaaatgtgggtacatcagcagtggactttatagtccttggtgccttcttactgagaaatttcctgtagcacctatttttattagtttttagaccaaagaaagccaaacaccattttatatttgacaatgcttcctgtattatttttataccagataagctaaatttcacctttatattagtgtgttattaattttaaacttagttttaataaaacttatagacataatttattcaatttttaatgtctgaccataaggtaagatttttatagactctttttaaccttttataatttttgttaaagagcaggttagtgctttaagaaaaaccctttgtgtttttattttaatgtccagttcacagaaaaattggatgataccctttcaaccttagccaatatgtttgcatacagtttcctttacaattaatgttttaaaacttgcttaaaccttcaaaacaaatttttttaaccttttaatgtaggtaaaaatccacattcttatgcctccttataatccttttactgaaagtatattttactttgcttatacaccttgcaaataaactgtttctgcaatagttttacattcaggaggtctaattacttttaaattatacaacatttcttgcataaattcctttttataagacactttttttttctttcacggctttcacagacaattcttcgacatgcctcaactttctgacttattgcaaacatccctttctttaagcaaccagttatttcaggacaagaatttaccatataacattctctttacataaattctcctccccccttttttttcctaaaggtgataaccattcttttccaaagcgaacttccttcatatctgtggactagactgcctaaggccataagattagaagttaggataatacatgttacaagttaggataatacgttaacttttagcaaacttkacttttgttgaaaactttgtaagtttgggatttcaattatcctttgctgttaataagaccttgtttagtccaaattaacttagaattgatatagatggttccttcctgattctgtaagtactttaaggcttagctgagtggaaacagctcatccatgtttgattagaccaattattaggccattttcctaactctgcttttacaagagtttccctrtcaattactgaatacctattgtgtctttttcactcagtcacctgggaggaaccatctattgtcctgtcctgaagggagttcctcctaggtctggtcagacctttgtgtggtaattaattaagatttagataccctgttaggaaacctgctgcgttaagggaattatccgtcgttaatgttaaatcatctttttctaacagaatagccccatactttaagatttttgagttagtaagctacctttttttttttttttttttttttttttgacttaggatagttctgaactggtgaggtgtgctcacaatcaggtttcctctaaaagttatttttttactttcttctgttagcaaagccattgctgctacagatagaatgtatttaggccatctgcgggttactgggttaaggatttttgataagaaggctacggggttgtccatggcctcagtgctttcgggctacgtccttgtttacactgacaacaaagtggtattggagtgttatagggtcacggagaagacctttaattatcaagtacaggttcctaatttaccttggcttttaaaggaatagggtacactgtttttttcttaactacttgkatatctctctctctttctctttgactttgtttctctcaatctttgactccctctttgtctctctgtctcttcctctgtctcttcctctctctctctttgcctcttctctctcttccccctctctttcttcccctctctgtctttcccctctctctstctttcccctctctctttttctctcctctctgtctctctttctgtctctgtctctgtctctctctctctgctggtctttccttgcctctgccagccgcttatgctgctgttctcccctctccttcctcttcccctaggggagggactggcgggagtggagctactttktcttcctctaagaagaaagggggggtttgtgtgaggttcaagccttgaaattagcagaagtctcaacccctgaaaccagggatgtctcgccttgcctgtcccaggaggctcaacccctcaacaccagggaagtctcgctttgcctgtctcagaaggctcaacccctcacaccagggatgtcttgccttgcctgtcccacaaggctcaacccctcaaaccagggggtgtcttgcctgtcctagaaggctcaacccctcaaaccagggagtattttgccttgcttgtcctgggaggttgacctgtttccccccttttcccctctgaaggtcctttgcacacttcccactcgtgctgtcctctctggctgctcccctaagggagaattaggcccctgttagtgttggtgtgctggtataaatcccatggcaggatctgccctaagccatatgaggtagctatggaaccatggagaggacccactcactccatcctgcagtaggacttgtcaccatccacacaacaccgtaagcagggttgttggtgatcattcacgcatacacatatttagccctccagaatttgaccaccaaggaagtactttacggctcccgcggcttatccttccttggtctgcgcacagagtcattgccacagtatgtgaggatcctttaagctaggtcgctggccagttcccccccccccccccccccccccccccccgcattgctgagagcttgggttattcctcgcactgggtgggtcttgatttctcacccctgaggccaccacaatagggcagggtgcactgcagaaccagagaccaccccaggaggggaatgtaatcccagatgggcccccaaattgtcacatataaagtttcagtgctgctaaaggaatagcattcgaatatacaattttctttttaattctcagcggtgcaaggtacttctgtatagaagggtgcacccttacagatggaacaatggtgagtgcacccaaaagttgttgggttttttttcttttttctttttctttttttttgcatgataacatctcactgcagtgtcaatgtcctgggcgcaagcgattctcccacctcagtctcccacatagctgggactataggcacatgacaccgcagaagtcttaactcattccagaatcaactccaaatcccagagtctcatctaaatcagatatagatgagagactcaaggcatgattcatcctaatgtgaatttctytccagctgtgagcctgtgaaatgaacaagttatgtgctatcaaaatagcataggttagacattcccattccaaaagggaggaataaccaagaaggaagggataactcatccccagtaagtccaaaacccttcagggaaaacaacattaagttttaaagctaaataataatctcctctgactacatatcctgcatyctgggtacactgggatagagatttggcccccaaggcctcaggcagccttgctcctatggctttgttgggttcagtgcactcagtaactcacaggttggagtctcctacttgcagctctcccaggctgatgctgtaaactaggagctctacagttctggaatcatggtaatggtcccagtcccatatttccactatgcatttccctattgaggactctctgtgctggctccaacctcacatttctacttggcatttccctggtaggagctttctgtggtggctccacccctctgacaagtctctgcctgggcacccaggctgtctgtgacatcctttgaaatctagatagagttagctatgcccccacaactctcatattctgcacacctgcagaattggcaccatgtagacaccaccaaggtttatggcatggactttgtggagcagcagctcgatcctcacctgggctcccttgagccatggctggggtggccatggagtgctgggctggaatgcagggaggagagactctgggcagatagcctgtggagtatgccccaggtctgtcctccagaaccattcttccctcctgcagctctgggcctgtaatgggagggcagcctcaaagatctctgaaatgcctttggggtcttcctccattgtcttggtgattccttttgttagtatgaatctctgtagcaaagggttgcttggccacaccgttggtttgctccccaggaatgctttttcattctgtacctggccaagctgaaaaattaaaaaatctttctgttgtgctttttattttatttatctatttttttgagacagagccttgttctgtcacccagtctagagtgcagtggtgcaatcttggctcrctgcagcctccgcctcccgggttcaacaattctctgcctcagcctcccgagtagctgggattataggtgcccgccactacgcctggctaattgtttgtatttttagtagacggggtttcaccatcttggccaggctagtcttgaattcctgacctcgtgatccacccgcctcggcctcccaaaatgctgggattacaagtgtgagccactgcccccggcccctgttgtacctctttttaaattgtaaatttcatctttaactcatttctttcttctcaactcctactgtatatggttaaaaatagccacacagctcctttgatattttgcttagaaatttcttctaccaaatatcctagttcattagttcattgctcttaaatcctgccctaggtcatgcacacaattcagccacattatttgccacttcataacaaggatggtgtttactccagtttacaataagatatttatcttttttatctgagacctcatcagaatggcctttatgtccatgtttataccaacattctgatcatgaccccttaagtaatccctaagaggcctcagactttccccatagcacgtctcttcttccgagccctcatcagaatcatccttaatactccatttatggcaatctaggctttttctaatctgctcttccaggttcttccagcccctacccattacccagttccacattttcagttattttttatagtaacaatcctactctcggtaccacttctctgtctttcttcattttgtgttgctataatagaataccacacatggagtaatttataaataaaagaaattcatttctaacaattctggagggtaggaagtcaaaggttgagggctcggcttctgttgagaaccttcttgctgcatcatcccatggtggaaggcagaagggcaaaagagggcaagagcaagtgagcaagagagggccgaacttgctttcataacaatccactctcatgataaccaacccacttctgcaattatgacattaatccattaatgggggcagagccctcatggcctaattatctcttaagggttccggtcctatctcttaataccatcacagtggcatttaaattttaacatgagttttggaggggacattcaaaccatagcagaggtttaagtaagataaagactgagaactattcattgsatttggcaagttagagttatgggagtgtgggtctatggaccagcctacagagagagggctgaaagagtgaagaggaggtgaggaagtagagatggtatattcttttgaggaacatggtcatttattcaatggttatttattgagctcctaccatgtgtcaggccttgctctagatgttaatggcatgtcagtgaataaaacaaacacatttctgccctgaagaataccactttacattgggcctatagagggaaggggagaagaggctagaaatagggtacatagtcaaggaaatcgtggagttttttttaaaggaaaataagtatttaaatatatttaagttaaggaaacatgggtagatacaaagtagagatgaagtggttgacagtataggaaagacaggataattattggtcaaaaaatatggggagatagagatcaaaacataggtagaggctctttgtgagtcttgaatgggagaagagatactttattctttctcaaactggaaggaaagagctgatgtgcacacagtgtgagggaatgcttcctagatgaccctgattttctaagggatgtaggagcaaggtcacccatatagagaggattgtgataggggacttgagagtcatgaagctttgaaatgagcatttagggtaagtggagagtcagatgaaggaagacaagtggaggtttgtggagtagcactgaagaatttgtaatgacattaattttttatcagtgtggttttaccaaaactgttctcagcctcctacatgcaggaatgaagaaagcagtttgcgagattggtcctggatttagagctttgtaggtaagtcatttatggcaaaaagccaggttgggaaggaattgagagggctagtgagagaataggttccatgaatcaatatggtgttcagagatcagagggaaagtgtagatgaggactggtaagggctttgagaaactgagggtagagtcaaaagagtagtggtctttagctgagtgcagtgctacatgcctgtaggcccagctactcaggaggctgaaatgggaagatcacttgagcccaggtgttcaaggctgcattgcacatgattatgcctgtgaatagccactgcactccaacctgggcaacatagtgagacccctgtctcttaaaaaaaaaaaacaaaaaagagagtagaggtcttaaagagctatgtagtagaagttatggagctgaaaaatgagagagggctattatgtgtcagggatgaagtaatatgtgataacagatcctactctctcactatagaagaggtaggtaaaaaagagtggaggtgaagatccttaaagcaaaggagttttgggactcagcaatctaggtttctggattggggtgggtgttgcatgtggatgatagaattttcaagtaccatggcaagtgttggcatagagaacaagtttgaaagccaaatttcaaactcttcagccaatgggcaataagtgaccagagaccggtgtttgatagtgatgacaacggatggtaaaggtcactacagataagaagtctgagaactataagatggtgtgttcagatttcatcagatgatggcaggagatgagatggagaggccaccagtgacccaaatgaatgaaggcacacgtccaaggagatggatagatgaccatgatgaggatgggtaaaagctggtatctccagatgatatcaaactaaaggaatgatgccatgagtatggagtaatagactctataagcaagggggaggcaagaggaagcttgcttattgccctctgagttacatagttaagaggttcacagggggaagaattttaagaagacagccaagtttcaaggaatgtgggtggttgtaaggtagggtttctgatgttaagatatagagagtttgattaacaaggatggcaggttctataggacgtagttttttttttttttttgagataggttcttgctctgatttccaatctagaatgcagtggcacaatcatagctcactgcaacgtcaacctcctaggctcagatgatcatcctgcctcagcctctggaataactgggattacaggcgtgagccaccacatccagctaattttttgattttttttgtagagatgaggtctcactgtgttgcccaggctggtctcgaactcctgggctcaagcagagtcctcccacctcggcttcccaaagtgctgggattataggtgtaagcccctgcacccagccatataggacatagctagtttgtttgtttgttgatgagacagggtctcactctgttgcccaagctggagtgcagtggcgtgatcttgactcactgcaatctctgcctcccagggtcaactgatcctcctgcctcaatctcccgagtagcttggactacaggcatgcacgccaccatgcccaggtaattgttttgtatttgtagagaagttttactatgttgcccaggcttgtctcgaactcctgagctcaagcaatctgcttgtctgggcctcccaaagtgttgggattacaggtgtgagccactgcgcctggcccaggacttagtttaatgaatgggagagagagagggaagggaaacaattaggtcatgtatgtggagtggaagaaggaagcccagagcagtaagtagatcaggataggcaattggatgagagtcatgggtagatgtaattggccttttgagtcccacaatttttttttttttttgtacaggcattttcagtaaatgccatgtaagcagtgcagagtgccacaggagtcactggtcagtcgcttccaccaaccgtttccttttgcagatactgcctgggtctgaacctgattaaagttctacattataggcttcctactccaaatcctaatgtttattctaactagtatcagtctgtttcagtcaaaatacaaactataacaatgaacacgctattttagaaatgtagccaaaatccttacttatgatctatgattatgtttcttttaaattttaaatgtattcctaggagtgaacgaaagcgtttcttcatagtgttttatggtcaccattagagcccaaatcctgctttccctatagcaactgggtggttgtgtttttattaatctattaatttattttaaaaaagaaaaaatagcagcaaaagtaaagtaaaccttaggagttacacaatggattgcatacttaatgctatggacaattgctaacccaaccttactttaacatttacaaagccagttttgattagctctttattcctagttatcagatatactccatttctctaaattaagtccagaggtggtccttactgagatttatagccactgataccacaaagtcttataatttagctgtttaagaattcttttgggtaaaaataatttaggaaggaaatctagtgttcaccaggttggaaacaactggacattagtaaaattgaagctccttagcaaagcttattccggtttgttatataacataccgattaatagccagaggttacctggattcatacaagaggcactgtttctcaaggtcaagcattgcatggccctttattgcaacttttcttttaaatatgaacgtataagtcagacttatttttggatgatcatagtgaaacccgaagatccataatgaagtttatgtgacagagatccccacacaacaatctgagcgayctctatagtggtgtacaacttccctgttgctttggcagtttcttaaacgtaattattcccaaagcaaatctattcaagcatatttaaaaagaatgggacagtatttggcaagcataagcgtgttttaaaagtgattccaaagatttaaaggttttagctgtaagaatgatggataatgagaattgcagaaaattagcgagagttcttttgccaagaacagtagtttgggaaagctttgggctttaaatagagggaattatgaataaagacagtagttgataaagatgaatacagtaaaaattaaagtgttgttgcctttaagagtattttatgtataaacttgattgatgtaaacttaattgttcaatgtttaaaagctctaattaatgtagtttatacttagtatgaagcacatcaaggtctccatttcctctactcactggaataattgaactatatattcagacttctctcactgcttcactccctacatatattcccctttacttttctctcaaaaatccctgacttctcctgataaaaataaattgctttaaacatttattgttaataaatgcattaatgaaaaagcagaaacatttgtggtggtttctctagttttttaaagcaaatctctgtaggggttcctaatttagttctgttccacgttgccctctggtcactaaatcaaacacagagccactgctgcttagggagctggcattctagtaaggcaagctagtgctagggcactagctggaagcctgttttgagctgactggaggctatgaaccccctaaagaaagagacagggtcccttgggcctgaggcttatcggtgatgggaggaaatgttgggtccagcccctggggaggtgaggtgcactagagaaactgagaggcaaacaagtgtgtccaccaggacctaatgttgctcacaaccccttaaccacttaatcatctgtcattcttttaagtaaatacctgcttatgctcattttatcgttttgaacattccatcttcagggtgctaacttgacaaatttttggtaaatctgtgcaatattagataaccacaggaacctttttattcaactcccacactttatgaatgggaaaacagactcagagagggggaactgagatagagttggctttctggtaagataagcttcctaatttagcatggggattatgcttatcactgtgtctagctcattccatgttctttaaatatttgtttcaataaaatgggataggcctttggattaggggatctcacaaatacacaggcccctacacacacacagattattgatttgatttggaaagaatgataggagaaggtgaatgtctgaggccaaccatttgcaattctaaatctgtggcccccttcttgttcagagctgttagctgctctgaccatcttctcctctttagttagggtgctaccagggcagtatggaaggtttcttcccactgcttgccctgcatatgtgctttcttcttactcggcaccaggcctttcctgcattgcaggtattgcagggccacgtggtatgacacagttgggtgaatttgattacacatgctgtttatttttgcttccagtctagtgcttacccagagccctccactctctgctactccttgcattcaaccctaaactgagtcatttatcataacctttgctgaaccttttgaagctgatttttctttcctttttgcaagcattttgttttattgaagtcttgaatgaagtcacaatgtactattctgtcttttgttcatatgctaattaagaagtgttatctagttagcgtggcatagttcatttacaaaactattcatggtcattttgattttataaggtttctctctgtttctgtttcgcaaagactgtatatatgttttttagttaaacaaagttaatgttaatttctttcatttgtgctccctgagtttcaagtgtaataaccctgcagatatatttcacctatttgtattagaattatatttttttccatggacatcagttttttttttttttctttgtcagaagcaactagttattggcagcaaaggaatttattattccattgtgctatataacacaactaacaattttttttcagtatttacaatatgaaggcactgtttcataattgctttataagttgtcatcaacataatcaccccctttgagactggtgggaaaactgagacatcacatggttaaggagcttgccccaggttacataactaataagtggcagaaccaatatttgaacccagatatctggctgtagaactgatacacatagccagtatgcttctgttcttcatcatcccttgtacaggctctttgaaacaacctggtaattgccatgctctatgaaaaaaggccattaaaattgcaaatattggagtacctctgatttttgagcatcaaaaatatacccatcagaagatattcatgagacagttaaacattgaggctccaaccttgtttatactatattttcatctctggtcatacataacttgatgacccttggtgatctcaaatgactctaaatgatactctgattttggggctaggcctgtttaatcaaatgagtgagccatatctgtttgtaattcttccatccatccatctttccatctgtccatctatagaattcttcatctgcacgtaacagacacttaggtgttacttatccttactgcagaagaagtcctgttgtatcctaagagaataagacacagcttcaagaatcactggctgatcaccttgaggggaagccagtttgtaagggttcgccaattttatgtatctgcagccttccatatgttacagggactcttaattaagctgctgaatttggcattagttgaactttcagtttactttcaaggagagtcatgcagacaattccagtccaagagaacagcagttgggaataaactgagatacttggcgagaaaatgaggtgggagttgaatttgatgacagcagagcattcttgctggagactactagtggaaaatgaagttagaatggcaagggaaagtaaggtttgttagagtagctctgaaaccaagcacagtatacaactgaaaataaaattctcttgtcattgtatgcagactctagctttggagcctggcacgtgtgaattatacaaagattttcaaactaatttgatcgtattctagatcacaagaggccaaaattacccaacgctcagayacattaatctcttggaaatttaagacaaactctacgcagccccagtcagcctctacatttcagcaactcttattcctttcttctgtatttacttagcagtgcgctgcaaatatacttgtatacttccttcacttatgtcctacttgtgtttcctgtcaactctatgagattgtaaacttgcctattgcaggaattgatacagccctagctcagaggtcagtgagaggtagaatgcaagcaaaaggagagaagtgattgggcttcgcctcagcctgtacctactacccagctgatacttttcacaatggcaaaaggtgaaagagtggaagaaaagggggagagttactctatggcacatggcaggaggaagattggtacccttggagggcatgtatggaatttaaaacctgctcactttgggaggctgaggtgggcagatcatgaggtcaggagatcgagaccatcctggctaacacggtgaaaccctgcctctactaaaaatacaaacaaattaggtgcgtgtggtggcgggtgcctgtagtcccagctacttgggaggctgaggcaggagaatggcgtgagcctggaaggcggagcttgcagtgagccgagattgcaccactgcactccagcctgggcgacagaaggagactgtctcaaaaaagcaaaacaaaacaaaacaaaaaaacctgctcatgcattctgggcagggcaatgcaaggcaagataagtggagccttggatagcaatgggcctgtctttgagttataacctgataaggtcctagtcccaggaaaatagctaggggaacgaggaagaaataactttccttagggaaatcacttaaaaaaatcaccttactaggttccattgtttctgagctccagagcaagatggagtgtgtatatatgtgtatgtatgtataatgttttaaaaactttattgtttattgccttttccatcccaaggtaccagaaaatttcataagtggcaatttttgtgattgaaatataccacttaggtgttctagttgttcttctacacaagattcactgtagtctcagcatggggatggcaaaagctgataggagaaaattttctctcttgtcttttgaacatcaatgaaaggagagttttccttacctctctgcagctcttgaatgttgaattttaatattctcatttggagtttcatttgaacaaatagctttcttctccaagcccttgtaccaccaatcatttcaacctgcagttctccttctctactccacctcaccctttgtagaaacaattctttggtcttagaaaggtttagacacagttcattaactagtattttgtatttataaaaattcaagtgtgtggatgaaaactactgaaacaagtcttgttgtctaattgtagtagagtatctaggtttagagttgattgcccagtagtgttgtagagactatgacccaacaaatagtgccgttgattacatgctgttatttactcatttattagtgagcactttgtgtgggcttcattactaattgttatgtcaaatatctgtataaataaataatatctgttaatcattgagatgttattctttaaaatgtaattttcagtttgtaaaaagtgcaaagataatgttatatcacaccagtgtcctttgacggctttggcagagtctttaaaaaaattttttttatttccatagatttttggggaacaagtggtatttggttacatgagtaagttctttagtgtgatttgtgagattttggtgcacccatcacccgagcagtatacactgaacccaatttgtagtcttttatccctcacccccttcccacccttcagtcttttttttttgtatgagactttatataggttagtgatatttctccctgctctgcttgcagagaaatcaatgctgtgaaaaataccctgccccagtttatgattattaagtgagataaacttaaaaagagaacagctcatgactggctgatttgaatgtttgtcttatgcccagcctctgttccatggtacacactagtgccagatgataggcccttctgaaaaccttttacaattgtccttgtattttatggcaggatatgttcacagaaaattttctgtaagtcaaaataatgtaaattgaatctgattttcttcacagaaacaatattacattggggattatatctctggcctaaagcctgactttttataaaaatagaaatagctgtaaccatcattttaatcaactgtttaatcagctggaaatgatgaatctgaatactgttcaggagaaaattgtctgaagtatgtttaaaatcagttaacaaggcatcacaacaaccagtcacattaaattatgtttaatgaactaaagtgtcgtagtagactatacaaagtttttgtcataatcactgccttgtttttactgaaactaattagaaggtggtttttcttaaagcagtttctgcaaagtcaaggacttctcacaggatttcttttagtaaattttgataggtatgcttgaggagacttttgggggagactttgaagagacttggtgtttcggctttttgagaaactgaattgagattttcttcatgctttgctttgctcattgtaaattccctgtagcagacatagattttggagaacaaattgttggtctgtcttcattttgattgtcaccagagaagggttaatgataaaattatggttgttgagatctgaaggattattatcagcaggtaaagagggaagagtattytatgccgagggaaacagtggaatactcagggacaagaagggtcctccggcttacctggaatggaaaaaaggccaatgggttataatagagaaagagaagaggagggcaaatgaagttgaggaaataggaggaagagaccagactgtgtataaaactttgcaggtcagaataaggattttaattttcagttctaagatcaatgggaaacgattcaagtggggcctggaggagcaatatggttaggtttgtgttgcacatggttgttgtgtggtcctagctaggttagccctcagggtactgtgcagccatcattcttggcacttagctgagttgtatgagcatttgatgaatgcccggtctcccctctccctatactctaagctccttgaaggcaaggactatgtcttttttactcatcaccctgtctctagtgctgtacacatagtaggagctcaataaatattggttgaatggatgcatcaactgtgttaacggatttaccttgtgacccactattaggcaagggagttacttttwtattgaggtgaaattcacataacataaaactaaccattgtaaagtgaacaatctattggaatttagtacatttatattttttataaccacaaactcgtacctagttccggaacatttttatctccttaaaaggaaactccatacttattaaacagttactctgcattctcccctccccctagcacctggtaactaccaatctgctttctgtttttatggattaacctattctgcatatttcatatgatggaattatgcattatgtgaccttttgtgtctggcttctttcacttggcataatgtttttgagattcattcacattgtggaacatatcaatgcttcattcatttttatggctgaataatatttcattgtatggatataccacattgtgtttatccattcatcagttatggacatttgggttgtttccaccttttttttttttgagacagaatcttgctctgttgccctggctggagtgcagtggtgtgatctcagctcaatgtaatctctgcctcctgggttcaagcgattttcctgcctcagcctcccaagtagctgggattacaggcatctgccaccacgcctggataatttttgtatttttagtagagacagggtttcaccatgttggccatgctggctcgaactactgacctcaggtgatccgcccaccttggcctcccaaagtaccgtgattacaggcatgagccactgcaccagactgtttccaccttttgaatagttctgctatgatcatgcatgcacaagtttttgttctgatacctgttttcaattcttttgggcctatgcttaggagtggaattgtggggtcatatggtaattctatgtttaactttttaatgaactgccaaactgtttctcataggagctgaatcattttacagtcccaccagcaatgtatgagggttccaattactccacatccttgtcaacacttgttattttctttttttttttcttacaggctgttcattcacgccatctggaatgcatgaatgaacttccccttatttgcagtgaatatttcattccttggtactttattacatggttatttcacagtatgaaaatagaagtaaaactcaaaggtatattggacagaattggattctaaattcataaaatttgagtccaacagcattctggtacattgctttctgagatagacctgcaactattaggagaaccccagtttttctcttatatactatttttaggattgaagaagcagtctaaaggactaatctcacatccaaagaagtttcttccttctgaacatatgtattggttaaatcatttaacaactcttctattggaggtgtcttttgagagttgcattgagaattatgaggaagccccatgtagtcttatagctgaacgttctcatcataggcaattttctattggtttgacacatttgtatttctacccttctcctttttgtttttgttttgttttagtttagctgtgctcagcatgcagggaatagttgtatttgcttatagtaaatgactgggaaccaagctgagatgtcagcagaacattgtagaatactcaagtacactgactatataaagatcattcagattcctgtccatctgaagtaatcagactatcagtccaccattaatttgaggtctatcagtcctcattaataatgctaccaatgcaaatgcactttaattccattctttgaggactgcctatatttcattgggttctgccatttttcttcccttaagtaatgctataactattttctatttgacagcatgtagaacattttacatcatatccgagtttacaaagtagagtaagaatagacttagaattgtattaacatgttgcatacacatgtgctttttataataatgcaaactggagtgaaatgcattgcagtcaggagaattgagtctttatgaacttttaatttttgagtactagtcataactaagctgcttgcattccactgagcaaaggtttcctaatgaagaaacctacaactactgtgttgtttcatgatttagctgaaagtattattttctgtttaaagcttcctaggcattttttaatgttggctgtaaattcttataatggttctagataccccctatgtgtgctttagaaataccccattgctattttcagtcatacacttgaatagaacttctaactactgtttgtcttatttggtaaaaaacatttgttttgtggaaaattgtttggtttgagggtggtttggcctttagtgtgagtggtgtttttgtgaagtcatgcgttttgaatgtatccactctaataaaaattatttcaaatggctttatctctcctccctgtccctgtgtgtgtgtgtgtgtatgtgtgtgtgtgttttcattttacagcagaaatcctgtgtataggtaagatttgtattctaagaggtttattaattttaaaaattgccctcatggtagttaattctaacctgatttacttgcagttgtttgtaccttggttgctgggaaatggatttcattctgttttatcagaggagtaaacaatttccctagggtaataggcacatttgagaaggcattcattttttcacatttaaagattaccattaagtaaattgctactgtggtgctttaagtgggcatcttaaaagcctgaaagaaccaatgtaccctctagtgtaccaaaattagcaccttgaaggagttttatctagtcagtttgtacttaaacattttttttaaaggcattagcacatgaacctttccctggactttgtgacttttcatgaggttttatttatttttccctccttttctgctttgaagcctgaaattgtttttgtttgtttttgttttggagagagtctcgttctgtcacccaggctggagtgcaatggtgcgatctcggctcactgcaacctccggctcccaggctcaagcgattctcctgcctcatcctcctgagtagctgggattacaggcacctgtgaccactcctggctaatttttgtatttttagtagaggcaggttttgccatgttggccaatctggtctcgaactcctgacctcaggtgatctgcccacctcggcctcccaaagtgctgagattacaggcatgagccaccgtgcccggcccaaacctgcaattttttattccacatatattgtcttctcgtgtgtattagtttgtaagttactctttatcctgaaacagggagtaatttyttcctcaccyttgaatgctttttttttgttttaggggactaggctgaaacaggtggcaagtgatgcaacatccaaagccacttttcaagcttttttttttttttttttttttttttgagatggagtctcgctctgtcacccaggctggaatgcagtgatgcgatctcagctcactgcaacctccgcctcccgggttcaagtgattctcctgcctcagcctcccaagtagttggaattacaggtgtgtaccaccacgcctggctaatttttgtgtttttagtagagacggagttttgccatgttggccaggctagtctcaaactcctgaccaagtgatccacccacctcggcttcccaaagtgctaggattataggtgtgagccaccacactcggccggccacatttcaagttttattgctagaaagtccgtccccactagctgggtgcggtggctcacggctgtaatcccagcactttgggaggccgaggcgggtggatcacctgaggtcaggagttcgagaccagcctggccaacatggcgaaaacccgtctttactaaaaatacaaaaattagctgggtgtggtagtgggcgcctgtaatcccagctattcaggaggctgaggcaggagaactgcttgaacccaggaggcggaggttgcagtgagccgagatcacaccattgcagtccagcctgggtgacaagagcgaaactccgtgtcaaagaaaatctggccccactttcccctgcttcattttagatcagattatttagtcaagtcctctccaagttacatatgaagaaaccaatgccaggacttccccaagacacatacagaccgattgatggtagaaggctattaggaccttgatctcctggtttcttgcctctctttattaagctttagaagcaaaaacacccacctgggatcatagccaaatacttaattttatcaatttttggcatacatggatagaaattgtcacaaatacaacactgatctcacctcataaccttgagtgctttgccagtatagctgattgtgaataccatgtgttttttctaccagtggactctagcatagatgtagcccagatatgtagacatgtttgctgagataagaggtatattacagtagcattgcccaaaacatgttgtacagaatgtgatgtcactggattttccttgtgggaagaaaagagttctgtggtcaaaaaattttgggaaatgctgacttacacaaagttaaaagaggtttcttcaagactttatggagcttttactacatgggtatgcattgtgaataaccaggaggaggggtgggcttcccctttctctaaggaacctcattattaacttgttccatgtaattcagtctggggaacattgagtgtggtgtcctgatattcttgccatttatcttactgtggcattcctagttggcagtactcaaaggcacattaaaatttaacaatctaaacaatttttatttatatgtaaggcattactgaatatttgtcgtgctcttctttttatgcttcaatatccaagttatacattacatttcaaacgtcttgctaatttatatagtctcttttaagcatgttttaggaataattacaatcagatcatcagttatatttatagcagcatccagtctttatagtgcacagaagcttcaaatccaaagctttggggagagggaagagatgatggagagacagtgtcaataattccagtgcagttcccaagtgcctgtgtactctgccacaaagggagaaacgaattcctatttttactgtcaggrtgtcagatcaacagttccaaaatactaacggtatatgttctggacagcagcctccataagctcctccagtggccctcagttgtcatcaaacatggcacttgtcaagctccctggctaactctagtcctcttcatgaacactgaagaacagtgttttcaaaaccaagcactctctgctagtggaccataattcatcctgcccctttaggcaggggtagcaccaaaatttcccgtgcctcttctgtagagccagaaactttcttgctttaaataaaacatttacatgtgggttatgttgaggacgttgcctagttccatgctggcccagttgctagagtttcaatattcctatagtttgttaacatctgcaaacctcatcctttgttcctgcgaatagtttacagtcatttaaagtgatttctgggtgtttctgttaatcctgctgtaagcagtctcttacgttatgtgaccttattttatagataaggaaatgaggctcaactaagccattttctccaggtctcattttgaagaaaaaaaaaatgtaaataatatttctcagagtcataactgtcttgctttccctgtcctctccagattttgccctgaaagccttccctgtaggaagaatgtttgtttttttttaaagagatggggtctttactctgttgcccaagctggagtgcagtggtgatcatagttcactgtaacctcgaacttctgggcttaagtggtcctcctgcctcaggttccctagtaggtaggactacaggtgtgtgccagcatgccccgctaattaaaaaaaatttttttttcgtagagacaggggtctcactatgtttgaccaggctggtctggaactctgggcctcaagcaaagcattgggattacaggtccaagccactgtgccaggtccaggaagaatgcgccccccgccccgaaaccctttactttcttcatttattcaactaagccatgctccacaatggaaacttgctttttatctacctcttttgttggggatgttaagaaaagttatagcctggatgtgctctttaaattaattacatttacagctcgggcagtttttaagccagtttgctttttgtatggtatttaacagtttacttggaaaaatgcattcattggttttgctggacacactccaacttgtatttgaactggcagacctttctaggaaacatcacttttatagtaatgacactatcactgaaaaaagaaataaaaccctgttcaggtcgtcagacaccagttttacaatattttttcttttgctccagctagagtttcttatctcttcttaaactgtaataaaaattcttctgtggtgatctagaaagtaatttttggatgagaatttatctcttctaggtaatgatgctggtcaaggcatttttctccctaatatccactggcttttttccttgcgattgctagatattactgttggctgctgagatataactttcttacctctgagatatctaaatagtgagaaaagtcttccatccctaagggacctttccacataaaccatctgcttaggcctttgttgcatatatttttgaagcttgaatttactgtattacagtgactcttagggtggagaaactgtatcatagtgaatacttagattatgtctcttcctcttaaactacaactaaaagttcaattcaactttcctccgaagcttattgtttagccccactttttattgtggtccatttattgtaggcagggattagaaaagaacttcccaagatgaggaaaaattactgtgtggtgtaagatactgatatttaaaataataacaccttaaaatacagaagttacaaaggcaaatcaggtctttggagaagaataacaaaaagatatgaaatggtgcaataatggggctaaggccgccagagtactgctttgagctcttaaggaatagactgtcatctgatgcttcctttgctgcctcccatggaagtacaggaactaggcaagccataattggctcacttcccaagttctgggaaactttacaaggatcacaggggttggtacaagttgcttgataatctgcagcattctctctgagatttagctgccattgtgttgccaaatttctgcatgtcagtatgcagatggtcccatctctccctccagcctctgaggtttgtaatctatatttatttctcctcttttcagccaggttgggttttgaggtcttggggcctgctttattcctgctttttatttgcatgtatatttttatccatttcctgagggtaatcgtaaatggttagctggattttcagcctcactgctcctatctttaagagttaagaatctccttatttagagttttaaattttgttaagtgtttggaatgaaaggctgtgtgtagagatgggtagggtgaaagtgaaagggaacttctgaggttttgtatacttgctggttaagtttctgtgcatattgtcaggctttgggttaggaaagattctgttaataagggaagttgagttgctgagaccccaaaggaacactgagagtcgcaggttacttcctataaatggaagaacctgaatcattaaaagataaaattcctgttagaatcttgaatcacagaatgtttacagtatttttgatccatcaactttctattagcaatcctttaatgaagctgcatttcagtctttagagccacaatttctgagccctgaagttcttggagtaagggcatggtgggggaagggggatcagattgggaatacttagaattgattgtccctggtgaaattaaactgctcagtggatcactttgagataatgaaaggtccactctgagcttccaaacaaggcattgttcttatccaaatcctcatggtcagtctttttcttaagtgttgtgcttgctgatttaggtgtttgtgtgaggcttaatatccatttcctgtagtagtttttttttttcaattaaatgtgaagccattgggtaatgcctaattagagaaatctttgtgtttagggataaactttatgtattcatttgtcctttggtcaggtgtttgagaatttcagttaatatgactgtaattaagctttaaaggcagaacaacacaaaatgccccatcagtcttgcttcacttcctttggcaaaaggagagacagcttaatcacttcagaagttgcagtaaaagcaaaatctgaaaagtgcaattttaaggatcattttagagttatgattgtaaattacacattaagtttattcatttttgcttgttataatggagtgggcttggaaacctcagcaatttgaccaccgaatacattgtagttattttaaccaagaagcttaatacactggaaatgtttcctggcactgtagtgatctcctccccatacccccaccccttcagccctagtatggaaatgctgacttctgggagcattttagtagacatctgaaattttgatgaaatgctctttcaattttgaatttggcctttttaagacactatgctgttcaaaaatattcctgcttcagagaagaaaatagctttgggctggagagtggagaaccattttaaatcattgccaagtcttcagattttaataagaaatttttttgttcatttttgagcaaatacttttatttgctgtggttgcttacagaaagcagttcgatgaccaataaaagtaatgctgtaactgccagggattacgtcggttttaagattatttgctgataatccaagtagctttgcattatatcagggcctgtaattctcattatcagtgatctgaataattgatgggagataaccacatgcaaaataaattgtcgaaggggaatcttactttgcgagcagcttaaaatggttggacggaacactgagggttatttgtatttttaacctttggaaagcaaattgtttaaattatttaaagaaatagtgcaagattatggctggcatactaaaaacttgcaggatgttatttaaggacgatcactgtttgaaagagtctgtggcagtaattcttagctgtgcttgcaaattagaattgtcacctggggagcttccagaaaaattaaatattaaataaaagaacsaggcatcagtattgtgtttaaatccactgtgtgaccaggattaagagtcaaagatctatggctaactcataaatataagtttgccagcaaatggaaaggatatagaggtaggctttatttcagatccttttgccagcttttatagtaacagtcttgtattgaggtctctgtttttcttcagttcttatctagtcaggtctggaggcaaccaaggaacaaattttatttccaatggcttttcatttttttatgactagcaaagacataggattttaagatggtgccagttaaataattactgtgttaggttttttattgagaggccattttggggtataaattacttgctttatttttttttacagcattcagtttatactatggaggtataaattaggagtacaaaaggttgatttttatcttgagaaagaaatttacattgctttctctgttaattcatatattgtaaacatattttttaatatttgccatactttattatgtagtgtgatgtgtcattaaaatagagtcagtaccagcatatttccagttttaagaaatgctgttcttaaggacaattgaatgggaagcagttcagcacaggatggactcctaatgaattacaattcattacgaggtgccaggaatcacacactcccactccagactacactgcgtgccatccaaatgggaattttaaaaatgatttctacttagcgtttctctgctttggcaaagacacctacattattcaaaatcacaggaactaacaccactgtttttaacactctatattggcagcaggtgggcaattacattgaatttacttgagttcagcattgctattttttatgtgaaccaaatattattatacagttgcaggaaattccaccagccattgcagtttcatcagcttttagggtgaaacaggcacggaaaagwcacctacttcatactaccccacccccagtctcaggcacgtctcaacccaaacctgtttagggtaaagagactgtaaaatgctattttggaaaatgctcaggagtggacattctgctgcttctttcaggcttctgtttcatcatctaacagcaatcactgccgggatgtgcacacacaaaaccccaaacctgcatagtaatttcaatccattttctccaatttaatggagatagaggccacttaggccttattcagaaaagatcagagagatagtgtatgaggaaagctcttagtgaaactggaaatgtcattcaaatgtagggaattaataaaaatatcagtgtgcctaaaaaaattgtattgtgctttttccttttgttctttggcatggaatgtagaagacaattcagaattgggaaagcactagtccatttctgttttaagttaatcagtggttgctgtaattgaggggaaaaatctatattgacagcacatgacatatcctacttcactgattctctacctcctttgcctcttccccctttccacttgtagaattaactaagaacttgtataaaaggtaaccctgcctcatttactctgcagccacttcttccttgtgtgaaaaactaaacagccatatgaatattaaattaaaggttgcaaattgcaatgtatacgtggacttggcattttctgtaattcaaattggtacattataagagtcaggtctgttgtggagaccacagagaggccttaacctgcaacagaaggtgggagctggggtgaagccagataaactatacatctggcaggtgcacacactttcacttttaagttttacaaaatggatattatggaaaatttggtgctcttatcagtaagctgtgtcagaacctgtatattacagttgcaaacagagaagtaagcccctaaatcaaagctaccacttggtaaaggtactgtttactggtttccaggaactgtgtgaaaatttatctatgaatcatttactcttagcatgcgaaggaccttggacaatcagttgttctaatgccttgtctttgggcaggcagataaataactaagctatccagcatagatacttaactgactttttccaggtctccagggatcccacaaattctcttagcacatgccagagtagctttccagagttatatacagcctgaatctcttctacttcagtttgtcccagttactttttgcatgattccctacaaattttgaaggcaatatcataagcttaaatgaaaacgcaaggcaaagaggttttatctgtacttggggggtgatttttaatttttaaacgaagaaataattttccacataccatctacataagatgcacaaattcagactggagtactttcagacattgtagataattggaagactacaagttctaagtagtcttgcttaaaatgattactttgagggtgggatttatacctttgacctttaaatagatcactgaaaggaaggaaaatctttgtgactacatatattaaaacattttaggttggggaattatagttctaaaaaataatgggaatatataaatgggtatttgtttctgtcatgcatcctttgacttatatatgtggtagtctcagatatggtaatatagtaccatacaaggagactgtcccaaatttatataagaaaagggtattatcctgattaaagtgaagagagtgaggccttagcaaaattaaagggtgggataaaatagagcccaatcttgaaacttttaggttcggtgagtctacttattaaaaatgtaaaaggggcatgagaaatatattgtgtgaattggaactttacaacaatgaggctctgagagattgcaaaataaactatcctgtaaagccaaayaactagtttctttttagaaaaagtcgatcatttcttcaatagaggcagccattctatttctgacctttacacttatacacaattattttgtgtttagaagtaatctgcattatgctttctgttctctagtaaggtagttgaaaggttgtcctcagtagttgcataataaatgaaatattcccagtccattctttcgtgagttagtgtgttgctagtgaaggttatggttaagattcatttgggctgtggatgaaagaaaaatgattggcagtaaaaatattgtttctctagggtactttctttaatcattttagaattgcactgttgacctcagaacagttggttcaaacagcacttttactaatctttactatgtcagcaagtaagagcttaatggattttgaattccctaacaaggttttctcctctccctactactttctcgccagattatggcccagcatgcttggacaagaattatgggcttggtagaagtgtggacaaatgtgatgaaaaactgaattttttcccttttctcttggtcagtgtgctggagaagagaaacgagttggcacacgcacagtgtttgttggcaatcatccagtttcggaaacagaagcttacattgcacaaagattttgtgataatagaatagtctcatctaaggtaagtttttgttttaactcaatagatgttcatatagtgaatcagataatgcattctaatttgtgcttctgaggaaactgatgcatttatgtatgtgtacatgtatttgcatgtatatggatcatataccagctataataagtattcctctgaaagacagtttatttaaaaaatcactttgtcttgttataggtgaaagatcattcacttgccttccgttatgattcacagtgcttgttgattatgcatattactttaaaccrtaaagtttgctaaaaatacaaattacttacttgtgcaaagcttcctgaattacccttgaatggatgaactaggatataaaagaatgcaaattcttttataaaagaatttgcattcttttggagaatgctgtcctggaatgactttatttgcatttctttctagttcccctgccaacccctccacctcccatcccacttctcaagtattaatagactcctacgtcccaaagggtgcatgctgctcagtacactgcttcagctgtgatctgttaagagttaagtcactgcagctgtgtcaccgtttgactgcatctttcttcagcatagtgtaggactaagagcattggcctggaagtttgaacacctgtatttaaatcctggcccaaccacttactagttgtgtcaccttggtcaaattaatcgccccgattctaaatgtcctcgttggtgaaatggggctaatactctgtgaaaccacttcttatagctcctagtactcagtagtcatcattctgcaagtgttatttagctagtctttacctctggctgaccaggttaggtgctaggttggcctactgccatctcttatagaatggaatagatcttgaagattktcctcacttcctcatgtgccctggcaaggcagagataaaagttggtgacatttggttcactgtacacttgtaatcacttagaaactgaaacacaaaattatgcccttccttaaaaatatatgacattttggttttcaaatatgcatttaatttcttgtttgggcggtgatacagtagtgatcatgttttgctgggagattaacatgtgaaatatggtcaggacaggtgaaaattttgttgcctaatgagcagatatgtaggcctatagaacattttattttggataaaaatgtctatttcctcttaatcttacacactagtggcagaaattttattctcagccagaggttgacatacttatgcctaaaatagtgaatagttcttttactggaaatttcagctcaccttgtggtatccaattaaatggtctgtagtagtcctttgattcagaattgtggacttgtagagctaaatggtcttaagaggttaaggccagagaaatttaggcacatggtcaccaagcagagttagtaataaaaccaggagtagaactactttataaggtctagttgctctgaataaagaggtctttttacatcatcgtgctgtttgggttccttcctcattttttttctctcctcttgcattgtgcttggcatggggcgacaactcaaacggtagctgctattgttatttgtgtttctgtgattattattacaatagtgagtagtactattgatttcctcaagttcatgtgttttgaatgtgtgggatactgtctcctaaatggaggccttcaggtctactccgaaaagaccaacaatttcataatttgactttttcttcctcacattgtcttggctgtttgtatttataccagaattttttaaaggattattttttcaaaatatactgtttatagaatatgttagctgccttccaactttgtagcaagtgttgattttctttctccacccttcagtcataaaaataactatcttaattggatgccgcttttgtttacaaataccaccagtaatgtgacattataaatgttaaggcagggaacactgaagacaaacattttgacctactttaagttttatttgcttataaaagtaatgctttttttgtgggggggagacagagtctcgctctgtcgtccaggctggagttcagtggcgcgatcttggctcactgcaagccccgcctcctgggttcacgccattctcctgcctcagcctcccaagtagctgggactacaggcgcccaccaccacgcccggctaattttttgtatttttagtagagatggggtttcactgggttagccaggatggtctcgtgatccgcctgccttggccttccaaagtgctgggattacaggcgtgaaccactgcacccggcctaatgctttttgtttttttatctcctgggaacacaaatactttctttagaaaaatttggcctctacagcctcacaaactttaatgtactctgcagggattttggaaatcaccagaattttgtagctggtgcaaaacttggaaattcccttctttagcaaaaggagcattgattgtactctgctatgaattttaggatctttagtttccatcatgtttatctgttgtgtgtttttttcctttaaaaattttaaaggttttttttaaaaaattaattaatttttttttttttttttttggtatttttagtagagacggggtttcaccatattggccaggctggtcacaaactcctggcctcaagtaatccccctgcctcagcctccgaaagtgccgggattacagaagtgagtcactgcaccccgccctttgcccagcttttaatggagttgattttttttcttactgtttgagttccttatagattctggatattagtcttttgccagaatcataatttgtaaatattttctgccattctatagattgtctgtttactctgttgattatttctttcgctgtgcagctttttaatttaagtcccgtttgtttatttttggttttcgggcatttgcttttttgtcttcgtcatcagttatttgcctaggctaatgtccagaagagtttttcctaagttttctttgagcagttgactgctaactttattattactttaaatatctactactttatttttacctttttctctttcttttttgctgctattcagacacattaaaagttattcagacacattaaaagttatttggagtctcaagttcctcatctgcatttttaatgctaaaccatcagcatttttaatgataaattggaaatcttgggtaacacagaactggtcaaaacaagtaaagttctaaagcctccttttgcttaaatgaaataattgactctcaaagctgagattctcttcaactttcctcctttgggaaatttgcttagtaagtttataaagttttggtttcaaattaaattagatgatacatatttgaggcagtgacccacaactttttcacataatttcatctttagtggccacacttgtgtacagattatttaatccactacaaagcatatataaaatgcattgtatgtaccgggaaagctggcgttttttgtttgtttgtttgtttttgagacaagagtctctgtcgcccaggctggaatgtagtggcgcgcgatttcagctcaatgcaacctccgcctcatgggttcaagcgattctcctgcctcagcctcccaagtagctgggattacaggcgcccgcctggctaattttttgtgtttttaatagacacggggtttcgccatgttggccaggctggtctcgaactccggactgcaggtgatccacccacctcagcctcccaaagtgctgggattacaggtgtgagccatcatgcccagcccaaagctggcattttctgtataaatagttttaaacatgttctaaatgtctgggctgctttttaagtttatagttgtacttaaagatagtataaaagaggcccggkgcagtggctcacacctgtaatgccagcacttcgggaggctgaggcgggtgaagttcgagaccagcctcggagatggttcaaagggagaccccgtatctacaaaaaatacaaaaattggccaggcgcggtggctcacgcctgtaatcccagcactttgggaggccgaggcgggcagattgcctgagtttaggagtttaagaccagcctgaccaacatggtgaaaccccgtctctactaaaaatataaaaattagccgggtgtgttggcgtatgcctgtaattccagctactcgggacgctgaggcaggagaatcgcttgaacctgggaggcggaggttgcagtgagctgagatcacaccactgcactctagcttgggtgacagagtgagactctgtctcaaaaaaaacaaacaaacaaacaaacaaacaaaaaaaacccaaaaaacaaaaaccacacacaacaaaaattagccaggtgtggtggtgtgtgcctgtagtcccagctactcaggaggctgaggcgggcggattgcttgagcctgggaggcagaggctgcagtgagctgggaacgcgctaccgcactccagcctgggtgacagtgtgagactctgtttcaataaataaataaatactatttactgacgtctccaagcaagaactaacttgtaacaaaaactgaattctcatcattgtgtctaaaaaactgctatacacattttcttcttgtgattaacttttttttttgccatagaggtcatgcttgagataacattgtttttgatttgtagcaactgaccaagctggagaatctactttttagataaacaagttaatttgaataacttgatgtatatggctgtaactcaatttcacttttagttagaaaactctaaaaagtagacttttcttggtctgcattaaaatcttacatttgtattatactaaaaaagatgtgctagaaactaagtttaccttttagttaaaccagtagagtaaatggctagggcacaagttttaataaagatttcttgtatatcttctgtgtgctaaactattgttctaggcacctgtgataaggggacttaggacatgctccatgatctcttaagagctcatgacttgatgaaggagagaagagggcagtcatttcctatgaagggaataatcagaattcctccaggaagcagttcatttaataaaacagtggtcaactaacagttgggacttaaaaacgacaacagcaaaagtattcccttttgatgtgtttatatcacctttcacagatgactctgtaatgcttatttgattaattaaaaactctttaatttgggaacagaagggtaacgtaccagaagctcagccattagcctgttgttggagtttagcttattgttttagaaagttgattttaaataattgggacagttaaaaatgctggtctgaactatgtcagcttcaaagtgactggatcagtggttttgagtggcttctatttttggtcacaagctaccttgggaatctcataagaagtgtggaccttcttctcccaagtgatgcacatccatgcacaattctgcatttattttaaaattatcttccctaaggaacttcttggactccagggtagaacctattctaagttggttattggttgtaatgcagctgttctactgaatgtacttgcctccttttgtgttttttccctgaggattccctaaattttgagcccataagcctttttaaactgaaaggttagtaaattcccatataktatgtcgtgctctacaacttggcttttcagtcacctcttattaaaggttatgttctcacatattatacagataattgggatgggctttggtaattggtaattggtaaaagtttcatgctaaatcgcacatggtcagaagacgagaactcttaggccaactgtcaaccgcagaactctcaaatgtaaatttagctttttaggttaagaaacatttctttctttctagtttctggtcttactaggtcatctgaaaaattcaatgatttttggtcacttttaagtgattcagtccctgagcttaaggtatcagggacaaagtacgattgacagttggcctaagagttctgcagttgacagttggcctaagagttctggccgtgtgcaattcagcatgaaacttttacctattaccaattaccaaagcgcagcccagagtggtatgttattgattaaaatgaaagccctccatggcccagggttgtgtatacaccttcccagctgtcatggaaattggaggtactcatagggacagagtgactcataggggtatctgttatgatcatcaagactccagaggttagctgagccagaaattaatgtgttcattcattcctccaaataatttatttatttatttattttattatttatttatttttgaggcaggtctcactttgtcgcccaggctggagtgcagtggcaccatatcagctcactgcagcctccgcctcctgggttcaagcgattctcgtgtcttagcctctcaagtagctgggactacaggcgtgcaccaccatgtccagctaagttttgtatttttagtagagatggggtttcaccatgttgcccaggccttttttttttttggcgacggagtctcattctcgctctgttgtctaggctggagtgcagtagtgagatcttggctgactgcaaccgctgcctcccaggtttaagcgattctcctgtctcagccgcccgagtagctgggattacagtgtgcgtcaccacacccggctaatttttgttatttttagtagagacagggttttgccatgttggccaggctggtctcaaactcctgacttcaggtgatctgcctgccttggcctcccaragtgctgggattacaggtgtgaaccactgtgcctggccatccaaataatttattgtctgccttgtaccaggcactgtgttgagtgttgggaaaattgtaaacaatacaggtgaacaacctgctcctatagaactctttgcttatcaagggagaaactttaatttaaaatgtacacatatataactcactataataagtgttatcaagtaagtatatatagggtgacatgagaacacataacaaggaacctaatttagattgggtcagagaaagcaaaggtatgagactagatggttattgtaatgcgtagaatgaaagcttcatttctgaaaaaggttttcatatacagtgcctctaaatatatgcttatgtatatgtgtgagatttcagtttcaaagtgttggacatactaaatatcactttatatgataatgtggacccataatcagtcattactattaagatttttcaagttttcttcataacagtgttcttttttcttcctcccttacagtatacactttggaattttctcccaaagaatctgtttgaacagtttagaagaattgcaaatttttattttctcataatcttccttgtacaggtaagagctccttaaacagccacttaacttttagaaacttgattgctttaaacgaattttcaatctatttctaaccttaaaatgccatgtaattaaaaaaagacattccagagcttattatgacttcttaaagtagaaacataacatttaaagattatcattttgtaaatttctaaagttgtgtttttactagaaaacctgttgagattttgtttcattgttactttctttgaaattttcatggatatcatatttttgctcatcccaggatgacgtgtattgtgtaccattaaatgaaatggaatatatcaaaactgaaaatagttcaaactagtagttttattttgttacataccagtttcagcctaattggaaacttctcactcatcttcctgattaccatttttgctctctctcattcatttactcactgtaagggtgagagcctagttagatcaatctgcttctctgtattctttctactgttttgtgttttaaattttagacagtttaaattgtgtcttccatctttaaatctgtaagctattaaaatcttttcctcgccataattacccctgaaaattttactacattaaaggtactttttttctcatttcattttttaaatgaagcagaaaaatcccattgaagttgctcmaatgccctgttgatgttaagtgcttctgttgactcactttgaggctttgagtaaatggtactgtaattgaatttagccttgctacttaaaatcagtctgggatataatatgggcaagagcctattttaatcctgaatgatggaagatttgaaaaggagctcctctggatctatggtcagatgtcttacagatatagaataaactacctagaggattctgcttgaaagaatcattctacttggtgggcagtgcatttcatttcagttcagcaaatgtataccactcacctacctactatgtgctgtgcagtaggacagacaacaaaaatggtagcaggtacaatgaagatcaagatatggcttttctactcttaaagaatttatgctatagctgagaagaccagtcacataacagttatgtattcacttaatgtagtaaagccattcaagaagcattaacagaatgctttgggtatacagtgtaagttatcatttttttctacccaagaggaatttgataaggcttcagagaatagatgctatctgaacagagcctttaaggattagaaggatttacttggtggagaatgctgaactggtatttcagggatagggaagagattgcctaaagtcacagagccatgtagaagccttgcgtacatggaagtatacattgtatctacaacacagggtgtatggcagaggcagggcttgttgagggttggagatgagagtcaacgagttgggagggcagactgaactcaaaatcatcctcccttaaatgtagttctttttcagtatttcctgtgtcagtaaatgatgacaacattcacctagacatgctaacccgatacttggaagacatctttaatattagcatttacatctaactcttggcatttttgcctcctaaatatttatagaacttctttccatgcctgccgctaacactagtccaagcccatcatctttcacctagattacagcaatagcctcctaaatagactccctgccttcactcttgttcccttctaattcatcttccacagagcagtaagaatgatcttttcaaaatgcagttctgttcatgtgacctttccttgcttaaaactttcaaggatttcctgctatttgtgggatagagaatgaacagcttactttggcctagagggccctgcacagtctggctcctgcctccctctccagccccatctcacaccacactccctctcgccactggcttcctttatttcctagagacctgcatatactgttcactgtgcctagaaaactacctttcgtctagttaactcctgtttacccttcagacctcagcatctacacacttgttttactgtctgatttttcctgtaagctgccagctacatgaaggcagggacttgtctccatcttgtttaaagcagtatctctagagctttgctgataatagcacaagcgctgacagaatggtgctcagcaaataggtggtaagtgaatggatatatttcaataaaggggttaatccaagctgggataaaaactatgcctgaatttaggactatttcttaaactaactgccatgtagtttgcttttgttttaatgaaaattaatatttaccctactactggaaagtgttttgtctatgtttctgtttgaaatgtttgcagcatgtaagtgctgcatatgagttaatgacaaattttcattttactttcaatttaattttatttacctaggtcacagtagacacaccaactagcccagttaccagtggacttccacttttctttgttataactgttacagccatcaagcaggtaaatttcttatttayacttgcacctgcatttcagtccaggcttgttggaatttcattgtcaaaggctctttttcatatttatatacagtgggtagtatcctttatggatttattttatatttggttcctcttgaaaacctattaaaatgataggcacatccttaatgtatttccttgtttcctcttaaatatctgtgtatgtgggtgtaaatgtaaaagaaagagcaggtaaaaggtacagcccagtcaggaaataggaggcagattttttaatgcatattaattgtttcagcgtggtatgtctgtgtgaaaaactcccatttttgtggatttttaaaaattgcttaagcctgtagcgagaactcaagggaagaatactttaattttcttgttttttccttctactgcttcagggggtagtaggtagaggggacatttcctgttttttgtcagagctgatagactgccacagattgtgatatggatgtctttgaagtattttgaacattttgtatgctagtatgtttgaaaaattgcagatgaaaatggaaacaggaaattggaggtgaaagggtaggttaacaatgttaatcatgttttgtgtcagtccacagcatctgactatttacaaacatatttttagatgatatttaacaaagtgcttttaaaaagggtaccaaagaagcttgcaaaacaaaggtcttcttagcattattgggaacaagattacctttcctcttggggttatctggtcttatatcttgcctaccaggaactataagaatattttatcaagtgttcagttgcaaaataaagacttttggaatgttcttttccttagactgataggattattttctttaacatcataaaattgctggttccaagaatagcatgtgtggttttcaaaggcttttttactgattcattctgctcccaatactggttcatgttaggacctttatttcttcaccagcatcacaaaatgtactctataaagtgatagcttagcattgtcataaagaggacagaagaagaatggatatagtacctgaggggaaaaagtggggggaggcgatgaagagacttttcaaacagttgtgtttgaaaaggtacagacattcttacaacgaaaaaagacaaaggtatataaaaaaggagaggaggtcatgatcaaacattcatgaacatcctttagatcttttggcttaaatctactttagatgaaaagtccaaagtaaaatgagccattagatctttctctgattacttttaactggaaacgatgaataccaatttatattttcttttgtcaccaagtcagttgaaaagtttagctgttgatctctacaacttatcatagcttctctgccaaaacaatccttgcttgccttttctattattctctgtgggtgagaaataattaaaatactcccttggagatgattactcgaacagtctactacagcatatacaaaagattatatgtaagtgattatggctataagaaaatacaaacccaggacaatcttttttcaaattaaaaaatagaattaactaactcaagagtacagttaaaataaatcatagcctttcacacatgaaaatattaagtctccagtgcttgtgttttcattaatgtttaaagagtggagaaaacttttaacacaacaaagctatttatctaaggagtattttgaaagtgtgtctcagatttgctattaaaatgtgtagcattgtctctttagcattctgagtttaaattaatgctataattataaatatttggtgttgactcatgggaggatatagaaatttattaacagctttatttcattatcagaactcaattatatagttatttttatctttcagggatatgaggattgkctgagacacagagctgacaatgaagtcaacaaaagcactgtttacattattgaaaatgcaaagcgagtgagaaaagaaagtgaaaaaatcaaggtattttttcttagtccactccttttttaatggtaaaaatacaccattttaaagtgtataatttagtgtcatttagtactttataatgttgtgcaaccgttaactctatctagttccagaacattttcatcacccgaaaaggaaaccctatacccataagcagtcactccacatttctccctcctcccaggccctggcaatactaaccttctttctgtccctatggatgtatgtattctgaatgtttcatatttcttatgtgtcctttttgtctagcttctttcactcagaatgtttttgaggttcatctgcattatagtatatagcagcatttcattccttttgatagctgaataacatttcattttatttattcaccagctgatggacatttgggttgtttctaccttttgggtattatgaattgctatgaacattgaattacagtttttgtttgaacatctgtttttaattctttgaggtatatacctaggaggaaaattgctgggtcatattgtaattacgtgtttaactttttaatgaaccactaaactattttccatagtgcctgtaccattttacattcccatcagcaacataagagacttccaaggtagtagtatttttttttttgacaatctcaggcaattgtttattccagttaatcattgtttattatttacccagtaagaccctgtcaaataacatttttgacttgtccatgtcaaacactaattttttggttctcattagattttttaaattaaaaaattatatttttagagcagttttaggttcacaggaaaattgagtagaaaatatagagagtacccataaacccactgtccccaaacacattttctctggctgtcaacatcccacaccagaatggtacatttgttacaatcagtgaacctattttggcacactatcacccaaagtccatagattatattaggggtcactcttggtgtacattctgtgggttttgttaaatataggatacatatccacatagcctacatttgtatatatgtacatatgtatccatagtagtgtcataccaggatagtttcactgccctaaaaatcttctgttctcttcctgttcattccttattccccccaacccatggtaaccagcgatctttctgctgtctctatagttttgcctttcctaggatgtcacatatttagaatcatacagccttttcagattggcttctttcacttagtaatatgctttcaagtttcttccatgtctttccatggcttgatagctcatttgtttctagtgatgaataatatttcattttctggatataccatagtttatccattcacctactgaagggcattttagttgcctccgagttttggcaattatgagtaaaactgctataaacatttgtgtgcaggtttttatatggacatacattttcaattcatttgagtaaatacaaagaagtgctgaattgtatggtaagagtatgtttcgttttgtaagaaactgccaaactatcttccaaagtagctgtatcattttgcattctcaccaacaatgaatgggagttcttgttgttccacatcctcactgggttttgatgttctcagtgctttgtatgttggccattttaacaggtgtgtagtactatctcacttttgtcttaattagcatttcactgataacatatgatatggactttcttttcatatggttctttgtcatctgtatatcttcattggtgagatgctgcttagattttgcccatttttaaagcaggttgttttcttattgaattttaagaattctccatatgcccaacaatagttaaatttccttgcatcatcttatagtaatgatgggaggaagactacagagtgggagggtcaccagtgtttgacatagaatgtcttcctttttctactttttcttttctctattctttacatcctggtcaagggggaacttgtgccgaactaggttaggttaagatctgaagtttttgaaacaactgtagaaactcagcattattgatcagcgtaagaaccaaaggcagactgagtacagtggcttacgcctgtaatcccagcactctgggaggccaagttgggtggatcgcttgagtccaggagttggaatccatcctgggcaacatggcaaaaccctgtctctccaaaaaaattagccaggcagtcccagctacttgggaggctgaggtgggaggatcacctgagcccaaaaagttgaggctgcggtgatccgagatcgagccactgcactccagcctgggtgacagagtgagaccctgtctcaaaaaaaaaaaaaaaccaacaacagtaacaacaaacaaaggctgcctaaatgattcatagcatccaatctgttgttcccagtacactacgtaaaattgcaaagcaggcaaaggcctcttacatctctccctttctttcatttcctctttctgattttgttgacactccaccccactcccctttacaaaggcccccatttttcattttccctccaccaagcttcttttccttgaggctgaactcaaccaggtataatcttgattaaataaatgtgaagctattgtgattaaattattgtgtgagatgctatttgatgtagctgtttctggagtgtaagtgtgtgggaagagatgcttattagccagcagtctctaaatagcagattgcttggctggggagtcgggggaaagagtttgttgagactccttttgagcaagagagagacttggtctgcatccttagtgyggtggggagtctttgaagtgttaaagccggagagtgacttgatgatttttaaaaataaaactggagtgaggcaaaatgaaagcatgaatgtgcaatcagagagatatagcttaggcaaaaaatgataagggcttatattaggatgatagtagtattgataacaataataaaaatagtagtcaccatttatatggtatgtagtatatgccaggcagtctttttttacattctgttaactcatttaaccctcaacaacagccatatgaagtaggtatttttattatcctctctttacagatgatgaaaccgaggcataaggaggttaaggaacttgcccactactagtaagttggaaagctgggatttgaattaaagcaagcctaggtgtagagtccatgctcttaaccacaactctttacyacctgtttagattttaagggaaatggatatattcaggatattttttggaggtagaataatcaggatttagtgatttaggatgtagtgggtgagagaaacagaaaaaaaaaaaaagaataattaagatagccttcctggttttggcctgagcaactgagggaattacatagtgctattaaagaaaatgctagtgcttttaaataagatgggaaagcctaggagaaaaacagatttagggacagaggtgggagtgaagagaaatcaggaattcacttttggctatgttaagtttgagaaacctattagacatacagttggagttgtcaatcctggagctcagaggaggtgttttaaatagaagttgaaatttgggtgtcatcagtctgtacataccgtatgatgccatgagactggatggaatttcatacagcacagagaatgagacttataataggacttgaggaattccattgtgaagacactattatttttaatggaaggagtattttttggcgtccgaaatatcagaaactagatatagtaagacacctctcaatcatatgtcatgctttagtgccaaatagaaataaaagttatactctagtacttcaaccaatgaatcaaccaaaatatattgaaatattgtgctgagttacagaagggttacaaagaatgaaagagatggttcatgctctcaagaagttttatagtttagcttagtagtcatgccacataatgctaaaagaataaaaatacaagaccataactggtcagaacccagtgagtgcgtctgaaaaaaaaaaaaaaaaactctgaatttagagaacgggaatgaaaacagttttctcacatgagatgggcatgaaatagattgtaaaattcagagaggcagagtgtgaaaacatatggattggggcagagaatgaggaacaatgctaagaggtaaagaagctccttgggtaaaaatgaggtgttaggttagatttagtaaaaggagttgatttgaacatcttttctaatataaatgtttaatgctataaattttcctccaagtattgctttagcaacagcctacaaatttggatatattatgtttacattttcatttagtttaatattttctgatttctctttaattcttcctcgattcatgggttatttagaagtttgttatgtaatttctaaatatttgggaattttctggttattattattttgttttgagatggagtttcgctcttgtcacccaggctggagtgcaatgccacaatcttggctcactgcaacctccacctcccgggttcaagcaattctcctgcctcagcctcccaagtagctgggattacaggcatgcgccaccatgcccgactaattttgtatttttagtagggatgaggttttaccatgttggtcaggctggtgtcgaactccgcaggtgatccatccaccccggcctcccaaagtgctgggattacaggtgtgagccaccgtgccagcctagatacctttttgttattggtttctaatttaattccgttgtgttcagagagcatattttcattttctcattcacaccctttgtgttattgttgtcatacgttttacttttacattttataaagcccacaatatgttactatttttgcctgtgagttgtcttttttggtrataaaatatataaaataaactttaccatttaactttttttctttgagatggagtttgctcttgttgcccaggctggagtacaatggcgtgatcttggctcaccgcaacgtctgtctactgggttcaagcgattctcctgcctcagcctcccaagtagctgggattacaggcatgcgccaccatgcccggctaatttttttgtatttttagttgagacggggtttctccatgttggtcaggctggtctcaaactcctgacttcaggtgatctgcccgcctcagcctcctaaaatgctgggattacaggcatgagccaccgcgccaggccccatttaaccatttttaagtaaccatttttaagtgtacaatttatttatagtaagtacattcacaatgttgtacaaccatcaccactatccatttccagaacttttccattatcccaaacaaagctctattcattaaacagtaacttcccatttctcccttcctcagccccttgtggcctctattctattaatactttttgtctctatgaatttccctatcctcaatactttatgtaagtggagttgtacaatacttgtccatttatgtctggcttctttcacttagcataatgttttcaaggttgatccatgttatagcatgtatcagaaattccttcctttttaaaggtgaataatattccaatttatgtatataacagtttgttgatccatttatatgttgatggacatttgagttatttctaacttttgactattttgattaatgctgctgtgaacattggtatataagtatctgagtttttccctttgattcttttgagtatataacttagagcagaattactaggttgkaattatctttttaaaacctttttttttttttttaagacaagagtctcactctgtcacccaggctggagtacagtggcacgatctcggctcactgcagcctctgcctcctgagttcaagtgattcttctgcctcagcctcctgagtagctggggttacaggcatgtggcaccgcacctggctaatttttgtatttttggtagagacggggttttgccatgttggccagactggtctcgaacccctgacctcaggtgatctgcctgcctcagcctcccaaagtgctaggagtatgggtgggagccaccgtgcccagcctaaaactgtttttaaaagattaacaataagaactatattttatatttacccacattttttcatttccctatgcagatttaaattttcatatagtatcttattttttatccatgaagagctttctgtagtattttatagtgtaaatctgctggaagtgaatgttcctatggaaaagtttttatctcaccttcaattacgaaaattatttttctggctatatagaattatgggttagaggggtttttttctttcagtactttaaagatattactccattgtcttctgatatgcatagtttctaatgagtctttcatttctattcttgttcttgtgtatataatatttctttgatgcctttacatttttctttctattttcagttttcagcagtttgactatgatatacctacatttttttcatcgtagttatccttctcgaagttctcttggatctattgtttgtcggctttgattaactttggataattcttggtcattatctttttgaaatattttttcagactcattctctctattcttccggtactccaattacatgactattatactgtttgatattttctcctttgagtaatttgttgtttttttaagtacactcctttttctcctgtttatatatcactttggataattttagttgctctgtcttcagaattagtgattatttcctttgttgtacccagtccactagttgaaggaaatcttcatctctgataacatggttttcatttctgactttacattttcatttttttgtagtatccctctgccagcattcttcgttcactgttacatgttgtctaccttttccactaaataccgtaccatttaatatcttttttttttttttttttttaagagacagggtcttactctgttgcccaggctggagtacagtggcgcagccatagcttactgcagccttgaactcctgggctcaggcagtcctcccacctccatctccagagtagctgggtctataggtgtgcaactacacttggctaactgttattatcattttttatagagatggggttctgttaagttgccgaggctggtctcaaactcctggccttatgcggtcctcccaccttggcctcccagagtgctggtaatatagatgtgagccaccacaccccacccatttaacatcttaatcatagctgtttttaagtccctgtttcataattacaaaatctggacattttgggtctggtttcatggactgctttatctttcaatgatggctcattttttgcttgtgtttttgtgcatctcattttttaattgaattttgggcattgtatgtaaaagaatggtattcactgaggtcagtggtatatgtgttctgaaatgggcctggcttcttctgtcaggccactagtgttggcggttgagtcaatctagtcaacagttgggctggctttggtttttgatgtttttaatgtgtcacttaacttcaaattccttaagtggtagaatgccattaccttgagctttgtgtggggcctggtgtgccggagagttttttatggtgttcctgttatactatctgctttcagcaacatcctatattcccgagtcccagaggttgcccctccccgccccacgttcccttgccttttctccagtggtagactgctatttcttgtttgttactcagtgtaaggctcttggcaggaacagaatgatttcttggttttctcattccaatcacaatattaagcaggccatatgcaccaaagcctcagggtaagactttctcaatatcctcccccctcatagtaactgaacttctaccttgtatcagcaccaggttwttggtatgataggtttcctgtccaattccctgtagcaggtcccatcccctgtagcaggtcacttttgtttctacctctcctctaacagtagtgatgtttccctgagactatgccagggaaggtttcctgcctttctcctagatgcagatgacrtttgcttaatatgagaaaggggtctatgattctggcatggtttttttgtgcctatttcttcacagcagtcaccacctgtatgcccgtgccagtgagaaaggttcttttaggtctcctgcctgtatgctttctcatgaacactcagtagaagcctctagagaagagctggtgaatggttgtggtctcttcttgtctctcaggcttgtagagattctgaactgtcatactagctcacacccagtctttaggaattggttaaaaatctagttgttttcttcttacccactttcatggtagccatctcttccttctatgcttggtcagttatgaaacagttcatctgtcctgtctctcctcagaaacacttgttaccctttgaaattcagttcacttggttgctttgcaacctcagctctctgatggactaaaaaatacgtatttgtttttagattatccattttttcctaatgtttgtaatgggaggtggtgatgttctcttgtggcttttaaaatggtaaatagacctctagagttcattgtctaactagatcatgttattccctgtctttaaaagtcctgtacctatccttttacctttagagtgaggcctaaatcccttaggctggcctgctaagccctttgtgatctgactcatacccatcttgtcagtctgagcttgcactgcagatataggggcctttatatttcatatctgactacatcctaactgttgaaaaaatgctctctttgtgtgttttatttatcaatgcctgagagtcatcttccgacctctaatgggtatctccttcttgtaagatgtgttaggattctgtttgttatctctcttctgcatatttaagcataaattgtggttttgtgtaagcaacataagtgtttatgtaagtgaggaaggaacaatccaacaaaataaaatattatttacaagttagttcaattattgatgctgttgatcttggctagtgattaagattggcaaagaaaataaaattcttcctgaataggtcttgaaatcctcatctttatctgccgaatcatattgcaaatagaagttgggtgttgcatgtattacctagcatttcacagtcagtgtgtctaggtcagtgtgccaaatattgactcccttctaaagtgggttatcttctgcatccagcagcctcttccctttacctgaaggtgctgtacaaaagtattatttataattttcaatatgtaccatggtgtgaaaatcttgggaaggaccagactggaggatttcttatatctttccaaaaaaatgttatgactcttcataagttgggagtaaagtagttgcaggatgttagtaataattataattaacacctttgaagtagttaatatgtgccaggcactttgctcagtacttttcttgtatcatcatttcatgctcacattaattctctgaggtagttgcaatcgtctaagacacttatttaaggtcatatagttaagtggcagagctgggatgagaagtcaggttaaagagtccaaacttttaatggttatgatttacttaaccctacattattaaattattcatgatttcttctctcaggtttttcctttccttgagctttgggtacttgctgataagaaattgtttctcattgctatattaagtgattctcctgacagcagatgaattcatagaaagtgacctatagaaaaaaaaaattcaaatattttgggaaaaatcaatgcctctctaattaactgggattttctgagcactgaagaaggacctggcacccaacaacacagttgttaccacatggcaggcaaagtatgttgaagtatgcgtggtacagagtgggagtgtggctgttcagtgttcatgaagtgcccagtttgtgacatgttgtagattttcttgattcattcatgaagtgataatgtcattgtcttatcaaacatttgtgcaagaaatatcagagagcaaacggatgtcagaatcatttattaaaggtaaaggtcagtgctaaggtaatctgaaagcatcctaagtccttctaaccttaaagaggattctgaatattgagtaatattctttcatcacctttcacatgatgtaggatgctgagatactctcaaagccccagagctagagataatctcttgctaatgttttgacttttgtatgagtgtaatgaatgctttgtttggaatttaaaatatttatatttatttctcaattccaggttggtgatgtagtagaagtacaggcagatgaaacctttccctgtgatcttattcttctatcatcttgcaccactgatggaacctgttatgtcactacagccagtcttgatggggaatccaattgcaaggtaacagactaaaccttgcctaaacattttgatctcaggatagttaatcatamaatactgcctcccatcaccctctaatcttttattttttcttatttttattttttcttaggttttatatttgaaaagagctgttatgtaattgttttttaacttctaagcaaacactcgtgtttgggtaaaagggtggtaattacgtgtggaaaaactgagccccaagtaaaagctaccacaatttttatagcactgcttgaatttaatattgacacagcctatttaatatttagactctaaaatgggagtaatcataggcttaaactgtgtgactatacaaataacttcatgtatgctaaccttacaatttgatctatttttttctaaaatgtatattttcattaaaaatgtatattcttgggatgtaggaaacccaacctggagtaatttgattgctatttaaaaataatacttagggctgggtgcggtggctcacgcctgtaatcctagcactttgggaggctgaggtagacggatcatttgagttcagcagttcgaaaccagcctggccaacatggtgaaaccctgtctctactaaaaatacaaaaaaattagccgggcatagtggtgggcgcctgtaattccagctactcgggaggctgaggcaatagaattgcttgagcccgggagatggaggttgcagtgagccaagatcacgccactgcactccagcctaggtgacagggtgagtctccatctcaaaaaaaaaaaaaaaaaaaaaaaaaaaaaaagatagggtgtagtttggaaaatgtttgctttataagtaagttataaagcaacattttatgtacatataacaaattataactcatttataattgcaagtgacttaaagtaaatttggccaaatgggggtaacttatttccctcatacactttctggcacagtcggttttcttggccatggtccagagctccacagggcatgaagatgtatcctctctatgctgcctttaaggagggttactcatgtggctcacctctgggtatgtccttggagggctcctctgtttgtttattccatctggagttgaggactacgactcagtatgtaaaaaagaacctttacctgttggatgactaattctgtatttcaaaagcatggtaatgacctgcttttaaccttttcaaaaacaaagttataatttagggaatgtcaagatataaatcaagaaatctacataaagatttcctgatagtgaaaaagttgtttggagtaagaaaactttcagatagtttcttttttcagttaagttgttctgatcaaatcagctaaaagtacagaggttttcaaaatcaggagatagttttaaatatagttcagacattgccgtaatatttcccccaagatgacgacaacagctttcccttctgcctaagtggtgcgctctttgagtctgctttaacccttgtttgatgatttataagtgggttcattggcgcctgccttgagttctggatgaatcaagtgcataatatacactagtagaatattctaattatctgactaatgcaagacacgtcatctccctgccccttgtacaaaatgtatccatattgaacattttcaagatcattaattaagctatttgtgtaatggaactattaatgatttttttcttgctgttggcaaaattttagcatttttgtgaccaaaaaggttatgttcaattcatatgtgtatatctccattgccatacactatagtgagcaaaataataagtctcagttctgtaaataggaaaaaaaataaatgtattaactttttcacgtggttttagttaattatatgcatgttgtgaatagaattctctcagctgtccatgtcaagaagagcttttaggtttttaattgtctttgaaaccctccttgcggcaggttatctttctaattatttgtaatatattttcataataataccataaaacttattagtgggaaatgttaatatttgtttattctgccaragcctcttactaaaacataaactaaatttgtttctgaaatcagttgggtgtatgattatgaaaagaaagtttttttggttttcactttttcttctgctttcaactagacacattatgcagtacgtgataccattgcactgtgtacagcagaatccatcgataccctccgagcagcaattgaatgtgaacagcctcaacctgacctctacaagtaagaatcacctggtttcattttacttctgtttgttggctctgcttctctttgctaatagtattgcaaaagaaacacccaccacttaccagcctactctcatttgtgtttttatgggcgattccttccttctggcagaaaaatgaatcaaatcagccttgttcactatcaacccagaataaatcattgtgggcccaggtatcttatgatttttcttttatttttattacttgtaaacatggccatatatcaaaattttagattatgttaccctgtaaggctgatctatcagactgatgcagtaaccagttaattaaataaaaaacaaatccttttacatgccatctaacattaaagagagaagggggatatcctcttcatgcaattagtaggttctatcctttcttagaatgatcatgatgcactaaagattgcaaataggctctttcttgtccacagtaaacagttaagggatgagtacaatggtgtaatttcctctattttactatacttaggctctctggagtaggtttgctgattattagtcattgtgggttgtcaaaaattggcgtttgatttcaagactggttagttgggttgattagagcatagtactaatcagggtagtgtaacaggttttatccccacgtgggctaattaattttatcctattctaccgttgcagatggcatccattacccatcttgttaatgcatgctgttagtcataatgagtgaccaagtggttggatgtggtttacactaacacctagtagtggaaaaacaaagtattcattctacttcaagaacaatgacctccctccttctcatcactttttctttcctctttcccttcctcttccgtatccaccttgatgataggaactagggccaaaaagtgtaacagttattctctaccttcaagggactcactgtgagcaagagatgaagtaataaagctaagcttatacaaggtgataatagaggtgagtgtaaggtctatggaatcacagaaaagggagtaacttattctgcctgagctagagaacaatatctatacccttgcatatttatagggaaatccccacatttttcagttgctttaagtatgaaggagaatgataggacagggaaggttattccttatttccttagacgattgaattccttgctstgtgacttcggaataccttgtacttctatcactctagtggtaagcacttgcgtcgtaattgcctatttacttttatagggcaaggagccatttcttttttgcttattagtacatcttcagcacttagtatagcactggcacaattaatatatgatgaatgaatgagcaagccttcatattttgtgtatatgagtaatatatatttctattttctggggaaaatgctgtttacgatgcagattataaaacactgatgttaacgagggattaggtatttttaccttattttgcagaaatacaggttaccatacacctattatattaagtgattgggtcaagctcagtattgagatcaactacaagtcacaggctggacatttccaagatggcattcaagtgttcactgtctaagactagtactatggtttaaagagtggtttcaggaccagcagcagcagcattactggggaacctgaatcagaagctcagggatgggacctagaaatctgtggtttaattagcgctccagtgattctgatgcacactcaagtgtaagaactactgaactagcggttttgaaaattgtattttagcaccagaaacctttcttcacatgatccaagatagaagttacgttatttatataaacttataaaagagagaggtgttgtgtgcatgcatgatgttaaacagaacttgaaaatcaattgagaacctttgtttctgctcctataatcccatcatgttatttaaaaattatatgaaaatgttatacaccttatcaattcaacataactttttttcccccagaaatataataggcttttgtagttcattcacagttttatctatctctgttttattatttgtattttcattcattctcatatttctggtacatggatttcacctggatgtagaaaacacatttgcaattttgttctttttacagatttgttgggcgaatcaatatctacagtaatagtcttgaggctgttgccaggtaagtttgctgtttctttaatttgtcctttggttgggggggggggtctatttttctgttaaatcaactaaaatagccaaatacctttctattatagaaaggaatataggccgggtgcggtagctcacgcctgtaatcccagcactttgggaggctgaggtgggtggatcacctgaggtcaggagtttgaagccagcctggccaacggggtgaaacccaatctctattaaaaatacaaatttagctgggcgtggtggcacacatctgtaatcccaactactcaggaggctgaggcaggagaatctcttgaacccgggaggcgaaggtcgcagtgagccaagattgagccattgcactgtaccctgggcaacaagagcaagactccatctcaaaaaaaaaaaaaaaaaaaaaaaaaggaatataaaggtgaataagcaactaaccttgtgattggtagagttgtggtgatagggtctctgtgttgtggggagggggctgttagaagtaatgcttatggtttccaaaatagcagagctccagacattttggattatattcccaaacctgttctagccatgttatttattatcctcggttgtgaagtggctgacaacattggaattataactggagaacagtgggagagtaattgagaaagtaagcagtgggtaaaatgctggaagaactacctggacttacgtaaaatgaaaggcttcattaaaacgaattgttttatgtatacgaattgtatgtatcagccttcatacaatttatcaagcagttcatacaaaaagggatgctttctttcctcttctatcatcatattaattaccgcaacttttccacttggcctttacagccacactcaaaaagttaaagaaatacagggtccccagtgatcccccaaaaggagggtttattctctccaaatatgtcagtatatttttcccaccttgacgtttgcattccctgtcttttattgatggctgtctgcttttgtgtcttgcgatctgctgctctgttctgttctcgtcttgctatccatgattcataatccttttatccccccccatgtattttttttgcctatgtgtgttgctggctactcccgtactgtgcttccatctgtgctgtaccctcaagtaacttcagagtgaaggacctttcagcttgtcctggggagtaagcatatggtataagtagacagataacattctgaaccccttggagataggtgtgtgtcagggcaaaatctgtccccagagttgttgatgctattggcttgtttggataagctgtgttcattttttatttaggtctttgggacctgaaaatctcttgctgaaaggagctacgctaaaaaataccgagaagatatatggtgaacaatttttaagatacacctatcaaaaaatatgctttgtaaaggctgtgaataaatagtgcatattaaaaagtaaacatggcaggtttgccatttaatttaaacctacatttaggtgttgggaatttataacgtggtaaactaagacgaaatatgacaaatactatatataattaaaattatcctataaatgatatacaactggtgagtggaagagggcctagatttcccacttttatagacttaaaaattcatagagccagctgggtgaggagttgrttgacaagttcttagtttttattatattctgtaatttcttaggagttgctgtttacactggaatggaaaccaaaatggctttgaactaccaagggaaatctcagaaacgttctgctgttgaaaagttagtatgcgccacaatttatttagtcattattgattaaaatagttactttcttggtaattccaagtaacaagcataacaaaaaacaacatcaattataatagcaactacaattttaagcacttgtttatgtaccagaaactgtgctcaatgatttgtatgtctgatttggtttagtcctctgaagaacactgtgaagtaattcatgttaacctctccactttacagatgaggaaatggtcttggagatggtatgtgacttacctaagctcacatagctattaaagggcagagtttacttgaactgtaaattcattcctttttgctagtggagttaatggtttggagtcctttagttgctatatgcaagttggttctataatatagataatagtctcctggcacctattgaagcagtgcctcgtagatcctcaagccagttgccactgctatagacctcaccctgtatttggcatggataaccagtatatcactggcaccctttccatagctccacttttaaactgaaagaacctacaccgagcttgaggatttcacattgctaccgtgccctctaccccaaacatttaggattcagggaaatggagacaagatactctttctataagggttgagtaagtaatggtgtgtgtatgtgtgcatgtgtgtacctctcctgtcactttacaggaaccttaataaggtgtgttcagctagtcagccattgcacttgggggagcattggtggtcaataaacagttcatggccagcttttccattttgccacttgaaagtaatgctgcagctatgataactgaggttaatacacaaaggcttgtgctgtagttacgcgtcgtacacagaaaaagctttagatgactcagtagtttaattcatatctgactgatgtctttggttttaaaatccatgctatcttatttttcagatctattaatgctttcctgattgtatatttatttatcttactgaccaaagctgcagtatgcactactctaaagtatgtttggcaaagtaccccatacaatgatgaaccttggtataaccaaaagactcagaaagagcgagagaccttgaaggtaatttgttttctgctgaaaattgaaactattttttgtgactgagccaaccttcactgaaatgctgctcagggaaacggcaccttttgttagcttctgaattttctctcgattacatggtggctctaagccaataaatatttaagaagatttattgtaaaagaaagaaaaagaaaaacaaagttttttttgtaaaaaaaacttttattttctttattgtaaaagaaagaaaaagaaaagaaaaaaagagttttttttcttttactttaggcatctatgcttgtttttagctctttatataagaatttaaggtgaaacaatttggcaagatgctttgacattttaatgtaataggagtatgtgaaatgtcacgataaaagcataatgaatgccttacatatgaactttgatctcacattcctatcttagggtggagtgagcaaagagaacttaaagaagtgaaaaagtactgacagaagtagtatatactgaagaataatgataaaattgagagtgttcttaaatgttctcacatactgtgataattttgactacagtgatgtagtgttattaggaagttccatctttatagcaagagcagtgttttcagcattgaaataaagatgaaattaattcttcctttatattatattggtctgatgaaattgtatgtctaattagcatgaactatctcttttattttaggttttaaaaatgttcaccgacttcctatcatttatggttctattcaactttatcattcctgtctccatgtacgtcacagtagaaatgcagaaattcttgggctccttcttcatctcatgggataaggacttttatgatgaagaaattaatgaaggagccctggttaacacatcagaccttaatgaagaacttggtcaggttagagcattgttttacttaaaataatttgtcaacgtagtgaaaatatctttttgtgtagtctggattaccaatatatgtgaccatgtcacatttggaaaagtgattcagagaaaattctttaatgcaggcatgtaatgaaggtaagcagtgttttcatagttacagcatcagttcttttgctggcatttttgagaaggatacaatttatgtattaaatttgaacgttactgaaattctccttggaactgggtgatgttacattattagctattgctttggaacaggaaacagtcttcatcaccatctataaccatttgtggatagaatatggggtagcaaatatggctcttttataagtgtattttgttccataagcaaaattgaccagagttgtcctattgacattttcttggtacatttctgatcaggtagaatatagacctaacaagcagagttatttattccagtacaagaatttcaatgaagggaaaacgtgagggcatgtactcctcaaaatgcattcttctttatataccaatgtaacccagactgtgaccccattctaacccaggtgcatttattttccagtgcaacacagtctggctgtaattcttcaagtgatgatttcttaggtgcttttcttaatagtatcgagaaagttttccccttttttttattttactctgtgtcatgtaatgatctttgtgagctgaaggaattttttggcttgcattttattctcatgacatttagaatgtcaagactgtggaaatgtcatttttgtgactgggagtttccaaattcagttaatgaaactgtgtggctggagcagagcctcacacttgtttaaatggggctgatttgcattcacacctcaaaactcttacttcctggctttaggcctctccgcagtccatgctttctgtttctactcttgatatagtctttgcctaaatcaaagtacccacatgacaactgcagttgaaaggtagaaaggactctccagataccattttgtttagacttgacttcaggacaccagtatctgaaaccatggagtctacatcctgtgtagataccaaggcactaagaatagggcttttcctttggatattgttcccacaaggttattttgttgacaatgtgggctgccgtacctgaccattgtcttttaggccagaagttttcatccagggttagagctatctgagtagaactgctctaatctcaataaaaggcatcaatttgcagagtgcatgagaaaaaattttgagtatacaagccaccttaagtgaacctttccctgacagttaatttagtggttcattctagatgctgagcaaatctgcctgttctggatttagtgcctggctgtatgtgttaacctactcaaggttgagcatgactagcttggggctagcctcaactactattacaaatagaatagccatcattccgaatatgacacttaatgttcactaaaaacagataagatgcccgggtcaggttccatttgatgagactcttacctctttcagatcttcatttcagcagattccatattacctatgggaatgcagtcttcttatcatctagactatgttaatactgcagaaagtaaagtagagctttgggtaatgatctagtaaatttgatgagtgaaaagaagctgcagtcttccttttagtcaccactcctttctcccaccaaaccttgcatttctagctgtggttgtcatttagtcaaatcaagttaatagccagaccatcacttcaattaatacagtgtataagcaacttgccattgttatcagtttgcatgtatagaaacgacctaaatgaaagtgcaaagaagtcttgaaatggtttcttaggccatttagtattcagtaaaccagtacacacaaaattaagtgtaacctgttttttctttgttgagtcaaatttaagatctgtgtaactttttatgttactaaaggcaatgtcatttaattcctgttcataccattgcaagcatttgcttaacctcttttaatgtgacccacactgggattaagaatagaaagatatgtttagaacagtgcttgacatgagaaacaaaaggaagtagactgctcagctcagttggaaaataatgcagtcttttatgattagacatcaatcttttagacaaccaaatgattgtaatccatattgaaaaacccgtggggctactcttctttgtgtcgccttcccatcttgcggctctgcctaatggtggaactttatagtgtgagtatatattctgattccaataatttaagccagtagctgttattcaccttttactgtctgggatgtgtgtgtgtgctaggtattattatgaagtaaacaagaaaccctcaagtttttaaaaatatcactggggagacacacacatcagacctaactatagcaatgtgatcataatcaatcagaaaagatgtggggcagtgcaaagagtctggtgttctttgattttggtgaagtcaacatcagtgacagtcaccatgtatatagcaccttttaggttatagatcattattattgagctttattttttaatctttacattcttgtgcagcaggtatcgttaaggttaatatttgaagttcatagagataaagagattttcctaaggtcacaaagttagtaggtggtggagccaagatggagtccaagtgttccattaagttgaaccattggtaatttttgatctacaaaatagatcatttcacatgttcaacatatacttcagagccttttctaccctacagcagttgtctcactaagagataggaaaagaaaatcttttttctttttttagaaattatattcaatgaaatactaattaacccataaaagttattatgtaaatctatattcttgacatggaaatacatatgtatatgtgtgtgagaaaaatagattacgtagcaaacataatgagattacatttctgytcaagtggtaaatacacattttaccactcaaaatattaacatgattgtttctgtatgatgggattaatatgtgtttcagggaaaactcccaaaatgtgtttttactgtgctctcacagcaaacaacacagagacttctgtgtccaaatgtgggagggagcagtttctctcaccgacaaacagtgaacaccaactgggtgtcctctagttcaattctgtctacctggagataacatcagatcccacagggtgagggcccagtccccaagactgccccatgactcctagacaccagtcacaagtctgggcctccggaacttctgatcgaccagctttaagttgggctacccacaatcccctctttgggtttgattaacttgctagagcagcagacagaagtcaggaaaacacttaacttacgttcaccagtttcatataaaggatattgcaaaggacacagatgaagagacatgtgggacgatatataggggaaagggtgtttagcttccataccttccttgggcgcaccaccctccaggaacccctacatgttagttatccctaagaccctgtttttctttcattattctcacatagccactcaacacttttgacaaaaggtatgtgaagttttttcctgacacaccaagcaagcagttctccagcaaacaccagctgggtatcctccagttcacttttgatactgcctacctggagatagtgtatcatgtcagatctcacaggttgagggctcagtcccataagactgccccccacttcagatgccagttgctaattcaggttgtaacgtatgcttctgattgaccagctataaaatggggtccagtagtttactagaccccctccttggatttgattagtttactagagcaggtcataaaactcagggaaacagtcatgtttactggttcattataaaaggatatgacaaaggatacagatgaagagatgggtgaagtatgggggaaggggcgtggagcttccatggagcttccatgacctttctaggcatccttcaagaaatttcatgtgttcagctatccagaagctctttgaacctagttttttggggagtttatggaagcttcattatgtggggatgattgattaaatcattggccactggtgttaagcttaaccttcagcccctctttcctccttccccaggtcaggtgtggggctgaaaatcccaaccctgtaatcatgccttggtctttccagtgacctgcactcatcctgaagctatctaggggccccgaaccacttgtcatctcattagcatgcaaaaacactgttatcactttggagatactaaggctttaggagctttatgtcaggaaacaggaaggaagatcaaatatatatttatcaaatatattttacaatatcacgcaaatgatggctttgagcttactgatacagaggagtctttttggcaagcttgaagaagaagagaggctgcttgagagtcagagtaaagcagcagcctcccccttcattcctttgtctctgttaaatatgagaatagttaaattaattacagtcgatctactcctcttctttttctgagtatagatcatatattagggcggtggttctgtaaatatgatcctaggaccagcagcatcaacactacctgagaacttagaagtgtaaattatttggtcctacctctgaccgactgattcagaaactctggtgatagagcagtgatctgagttttaacaagacctccaagtacatgtgatgcattctacagtttgataattactgcatttgggtataatttataggcatatacctgtgagattcaacgtatccagattcatactgcccaaactgtttgaaataggtgaataaattgtactttatattttaaagctaccatctttgacactaacaaaagagattctaatgctcatccaagtgcaggagatgaaataatccaggacacccttcagggaaaaatgaaggttaataattttgatcagaaaaaagccccaaagaatttcatttaaactggaagaatctaaatgatacacaagtaataccacttggattaatttaaagagagagttcaaacttggctggcttaacagaaaaaaaaaaagattggaatgctatatttgtgccagtgctgctaccgtgaaaagctttgaaaaataattagaaagcaactactgctgtagttcatctctttctcccttacataataaaaaccttaatcttgtccttatgcttgttcctatcagcccataattttaactatttaagcataaattgccaaaacgaggataaaattgtgggtttccaaaagccagatgttaaaaatagaagagataaaaaccgagataaaatagaaatgctcaaaatgatttatcttagtggcaaatttatttcttggcttatattttccattatttatgaaaatatacttgtgttatactttatctgctttttttctaaatttggaaacttgagtattttcaaaatatgtatagtaaaaagaaagaaatttcagttatggttttgatcactactgacctatactgtatcttccaattaggtaactgttaatgttgttattaattcttatgtatattatatgatgtggtgcattttattttaattcagtatttttatagaaaattttacttttaaaaggggaaaaaaaccttcatcagtttctgttttattttgttacatcccatttaatttattgggaaaaaatttttaatgggtaatgtacgtactagcccacaaagtgtaagagtgtgtgtgtgtgtgtgtgtgtgtgtgtgtgtgagtgagagagagagagagaaataagtggtcagtatagtcttacttcccacttgaaaaattgacttatgtaacttctttacatcaaacaggttaactggctgggcatggtggctcatgcctataatcccaacactttgggaggccaaggcttgagcccaggagtatgggaccagcctgggcaacatagtgagatgctgtctctacaaaaattacagaataattagcctggtgtggtggtgcgtgcctgtggtcccagctacttgggaggctgaggtgggaggattgcttgagccaagaagtttgaggttatagtgagctataatggctactgcattccagcctgagtgacagagtgagaccctatcttaaaaaaggttaacttaaatgagaagcgttcttagtttgataaaatagtcacttttttttttttttcctgagacagagtctcactctatcacccaggttggagtatagtgatgtgatctcagctcactgcaacctttgtctcctggattcaagcaattcttgtgcctcagcctcccaagtagctgggatttcaggtgtgtgccaccacacccagctaatttttgtatttctagtagagacggggtttcaccatgttggccaggctggtcttgaactcctgagctcaagcaatcctcctgcctcagcctcccaaagtgctgggactacaggcataagccaccgtgcctggccaatagtcacatttttttctattcatcttttacatttgagtagatctaccttagacatgtgatagcattttggtgtctttaaaaatactcatttattcctcatttctttggtaatattgtctctgtaattccctgacatttgacaagaagtcttagaaggggtgatttcctatggatatgaaaatagctttgcgttacagcaaactaaaaattagtcacactgaagaaactaacaatatatgtttgtgtccttgttttaggtggattatgtatttacagataagactggaacactcactgaaaacagcatggaattcattgaatgctgcatagatggccacaaatataaaggtgtaactcaagaggttgatggattatctcaaactgatggaactttaacatattttgacaaagtagataaggtgcatttgcattattgttttatataagaaaccaatctgtgtatgcatgttaacattccatagtagaaaataatttttaggtggacacatgacatagacttttgtgtttttgttttttttttttgagatggagtctcactctgttgcccaggctggagtacggtggcatgatctcagctcactgcaacctccgcttcccaggttcaagcgattctcctgcctcagcctcccgagtagctgggattacaggcgcctgccaccatgcctggctaatttttttgtatttttagtagaaacggagtttcaccatgttggtcaggctggtctcaaactcctgacctcaggtaatccaccaccctccgtcccccaaagtgctgggattacaggcatgagccactgtgcccagtgactttagaataactattgttggattcacctttcttgttttactgacacttctgaaatttgtaaatgagtagaatttacaagtaaagagaattgtgggaaatgacatttgggtaaaagcttgcttgtctgtatgatcataattttttgtgctttgtcttttaaaatgtaagctcctccaagaatgatgtctgttcaaatgattaaagtctcaggagtgtctaggcattaaattaaccagagtctccctacacttgagctattgctagattgtgaattagatactgaatgaagttttttaggccatgaagaagtcactgctttggcttaggtggtgccacaataaccttaatgagttaacacagcctatagggtatgctagctgagaaccaggaactcttattaggtactaggagaatatatagcagatttgagtgttaagaatttatacgtatctgctactaagtttgttagaagttacaacattctctcacattaatatattttctccgttcactgcctagttaccgggtgatcaaattaaaaataataatcattattttgttgctgttccacagaatcgagaagagctgtttctacgtgccttgtgtttatgtcatactgtagaaatcaaaacaaacgatgctgttgatggagctacagaatcagctgaattaacctatatctcctcttcaccagatgaaatagctttggtgaaaggagctaaaaggtaaagtatactttcttatacttctyctaagaaagtgaaatcacaggaggacagaagttatttgtttttttccgtttgcttcagtgaccttagcacatacatctcctattatttaataaaaaacacaactgctttagccaaaaatttgtggaaaattcccacacctaaccagttaagactaaaaagaaaatagttacaggtaggtattacttgccttactatttatgcatgccagccagaagtctgaatgttcatactatgttttgcaaataacataacagtggccactttttgtacaacacatgttatttctgaggtgctcccagcaattttgacatcatttgagaaccgaaagtccagttttacccatgaggttcaagataattaagtggctcaaaggtcacccagtgtgttagccgtagaatcagaaacccaaattgtctctcccttggttacaataattgtggctgggcattgactttctctgttatcaacttatccaggaaaagaaagtacagttatatgttgagatcatatgaaagagaagaaaagcataaacaagcatgagttaccccattgaaagtaatcattctagaccaggtgcggtggctcacgcctgtaatcccagcactttgggaggccaaggcgggtggatcacctgaggtcaggagttcaagaccagcctggccaacatggtgaaactctgtctctactaaaaatacaaaaatcagccgggtgtggtgacacacacctgtaatctcagctactcaggaggttgaggcaggagaatcgcttgaaactgggaggtgaaggttgcagtgagccgagatcgcgccactgcactccagcctgggcaacagagcgagactctgtctcaaaaaaaataataataaaaaaattaatcattctttagagatacacaaggtcttttttattgtttttgataggtacgggttcacatttttaggaaatcgaaatggatatatgagagtagagaaccaaagaaaagaaatagaagagtaagtagctctgtgtttgatgtttgtcatttcttaaccccatagtcaaatttaagtggattcaggcagggcagcaaaggaaatgatgccactaaaaatacaggaccctgctctcccagttcagagttttatgtaaatatagttggggtagaagccatgttacatagaattgcagaaactggagtttgaggtggaaattccaatctggttcacatctgggtccagtagccagaatgagagtttgcctggaatgtttctcaaatttagatgccatttcaggtctctaacacatgctacaggaaaaatcagtgaatatatgtgaaaccttctgctatctagtgtccaagcaatcactctgggattgcaagcccaggcaataaaggcagctttgctgtaaaccagaagccttgtttggttcggaatgttcaggtgtgagcctcggggcaagtactctgatgctccagtgtcttcacatttcctcttttgccacaaagaccctaatgaacaaagccaccttatcttaatggtggattttaattaggctctgtgattaatttgaatttcctcatctgaacttgaaatataattatgttatctgactttcattctggcccctaggatctcctgagacccatctcagaaacctgtaatatgtttacaggtacttgggtaatgcacccttttggagagagattcatagaagcccagaggaaggttcttggtctgactgacagggacccagggtcattgtcagagtttagattctagcccatctgcaacagtgcccacatctggccaacagcaaaccagatgccatgttagatgtcttatacatatactcccgcaagactaatgaccccctcactcccaccaaaacaagctatgtagtaaatactttttttaaaaaatactagttgtttattttcaaggaaatatttcctctcactttttctaataaccaactcttattttaactcttctgtgtctctccattgattagttcagccatccacacacacatttgaccagtctcatcatgtcattccactgtttaaacccttttattggctttcttttgctcttacaatacaatcccaaattccagaaatggctcacaaagatgtgtttccagcccctgcttacctttcttgctttatctcttactattcccctattgatgagttttttgggcattggtgaactacttaaagtcttccatgggccatgtgctctcatgctgccgtgctcattccctctactcagaatgccatggccccctttcttcatcatattacccttgcagaacccagctcaggcatgtcctcttccaggaaacctcctttcagatgacttccttctgtgttcttatatcttccctgtaagtgcctttattacagtatttgagaaactagaagggtagttatctcattatgctctgtctcccttatcatatggtgacccgcataagggaagggactcaggcagattcacctctattccccagcacctagcactgtgcctggcactccatacataaatgctgctaaaataattggcagagtgggactgtttctagacccctccaaatatggcttggtgggacagctctttatcttccatttttatgtggtcattctccttaccattttaagtaatatactgaggggctataaataccccttaactaacactggtgtcctctgacagcatgttctatgttcagagaaattctgagacaaaggaaagtaccagttgtgcacacaaccagtgctatctgttgatttaagatgtttaaatatcttaacatatttctgttgtgctttatttttctcagtatattctaggttttttactttgctcatttctcttaaagatatgaacttcttcacaccttaaactttgatgctgtccggcgacgtatgagygtaattgtgaagactcaagaaggtacatgtctgaaaagcttgaatttttctctttgttgatttgtaggcttattggttgattcactctttcaggaaagagaatcatttcatgtagtagtgtaggattagtgaaagtcatgcaaagcagtagcttttgcatatgctttcatgtrtttttttaagcacagatgttctgtttaccaaattgttagtgacagaacccttgttatgacagggtgtgccttttcttggtagcagaaccatatccctctgccttgggtgttcgaacaggaactgaaaggatgacttttatatggttcagggtactgaccagtctaccagtaatgtttacatgcagccacccagcatagttggatggtttgggattactagcagcagaatccttgagtatagggagttgcttgttatccctcactgaccttcctggttcccctactgcttgacactccctggaaacaggtgaggtagagaggactaagggcctggtttctgggaaatggcattgcagtttcactccagagctcaggttctttgttgagcagagtaaagcttgccctttgcaggggaactggtactgtaatcctgggctccctcatgtctttggaggcaccatggtggtttgccttctgctcagattctgcaagacccatgggcgagcaatcctgctttattcgaaggctctcagatacgtgtgtgtgtggtgtgccgaggtggtttgttttctaaaaatttttgatttatttcccagtaatttacgttttactattaaattttctaaattccttaatgtcagaatgggaggatacagacagatccttgggggaacatatcccacttaattcatactttgtggtgtgattgcaaagtcatgaaattgattttaataagtgaccatggagtttgttttgtgaattttaaaatacactttggatgtgtaagaataaatgaaaaaaaaaacacaacatttcaaatacttgctattcttatgtgtgcatgtccacatgttctacagcaaatggtgaaatgtctgtggaactggtctacaaaggtcattgacctcagagctacactttttaatttgttgacctcggttgtttcccttataaggataaagtgtctgtcttagtgcacaactgtgaatatttcctgggtgtgtgaagtgatctaaagctgcaattataccagcattctacaaagctattctcatcagtaaaaactatcaagccattgttttagaagctagttaatatagtttattcaaaattatttcagcttgtttgagcttgagctttcttcttgacatctgtagatgccatatgtgtgctctaggccatggcttcactgcatttttttttttttaagacacggtattactctgtcatctaggctggagtggcaagattatagctcactgcagccttgacatcctgggctcaagcaatccttccacctcagcatccagcgtagttgggtctataggtgtgtaccaccatgcctggctaattttttaatttttagtagagtcagggtctccctgtgttgcccaggctggtcttgaactcctgagcttaagtgatcctcccacttcagcctcccacaatgctgggattacaggcatgagccactgcacctggcatacattttcagaagaaattcagatgcagctccttgacacaagcccagccctccatgaattggtgggaggaagtatattttaacagaggtgcctattgtaaactctggcttattaattgtgttcataatgaccttgaagaggtggtacatgcctttctgacagactgaaggccaagatttctcattccatttaggtgagtattgcaaggtgtgctcagaatatacaacacttgggtgagagagaccgctttaaaagttactcttactaaaaccacaataccagccttaaaattctaagtcaagtactatggttctttattttaggagacatacttctcttttgtaaaggagcagactcggcagtttttcccagagtgcaaaatcatgaaattgagttaactaaagtccatgtggaacgtaatgcaatggtgagcctatactccttcccccaccaataagtaagcagagaaatgttgaaaatgactatgtttattggatttctgtttaaatgacagtttaaatacattttagcttatttttgtggtctatgttttgtatttggggatttgataatattacttttttttatcttaatakaaaacattttcctggagcaagtttcaggtcagaatttgcagccttaaaagacttttcaacaacctttgttaaaagaactgttacttcctttttctgaacctaattgaatgttaccttttcagttgtaatttcttcattttttcagactaaatatgtgtcagaatttctcttgtccatatggctaaagcaagagtatttacagagtgtgtttttttttttttccaactattattagaataactacagatctcctactttactcctaggatgggtatcggacactctgtgtagccttcaaagaaattgctccagatgattatgaaagaattaacagacagctcatagaggcaaaaatggccttacaagacagagaagaaaaaatggaaaaagttttcgatgatattgagacaaacatgaatttaattggagccactgcagttgaagacaagtaactagaaaatgatactcttattattttaatgaccagtgttttgggtgtgatctgccccagattagtaatttaatctcgaagtttgaaatctttagttttattgtttaagtggacttaaagatttatttattatagcaagtatgaaaaattacaccagattttgagctgttagtaggaatgatttttttttaattttttaattaatttttttttttttgagacagagtctcgctctgtcgcccaggctggagtgcagtggcgcggtcttggctcactgccagctccacctcccaggttcacgccgttctcctgccccagcctccagggtagctgggactacaggtgcccaccaccacgcccggctaatttttttgtatttttagtagagatggggtttcactgtgttagccaggatggtttcgatctcctgacctcgtgatctgtccgcctcagcctcccaaagtgctaggattacaggcgtgagccaccacacccagccagtaggaatgatttttaaggtaaattcatgtaacctagaagaatgaatcagttttcactcaggtcttttgaatatttactaagctatccatatatttatgcacatattatcaaatagtcttgacatgtttagggaagggtactacagccattgtttgagctggtgcctagacaaaggggtaagattttcagagataggtgagctgaaaggaaatttaaggtagagtgaacaacatgagagcttaatctaacctggttcaacagaccagagtatgtttttgcatgctttattttattttatttttatttttatttatttatttatttttgagacagagtcttgctctgtcgcccaggctggagtgcagtggcacaatctcggctcactgcaacctctgccttctgggttcaagtgattctcacacctcagccaccggggtagctagctggaattacaggcatatgccaccacacccagctaatttgcatatttttagtagaggcggggtttcgccatgttggccaggctggtcttgaactgctggcctcaaataagcttctgtcttgacctccgaaagtgttgggattacaggcatgagccgccgtgcctggcctgcatactttaaaataatatgcttttaacttacaggctgacctttttcagacttgattgcaggacactgccattgatctgcttgaaataataagttttaaattcttaatatttttagaattttctaaatattatatatgaaaattatgagaattaaaaagttacaaacatatgtttagtcacgttaaaaggtattgaaactctaatgaaattcctttagtctaatttcattgttattctgtggccaaaagaaacccagaggaaagtatcgtttttctcttgtcgtctttaagaattataattaaattcacattcaggatgattggcgttcctctttttttggagggtgggtcggggttatacattcaggtagtacatgtgcaggttcgttatgtggttatattgtgtaatgctggggtttgggcttccattgatcccatcacctaagatattaacataatactcaatgggtggtttttcaaccctcactcccctcccgtcttcccccttttggagtccccattgtctgttatttccatttttatgtccatgtgtacttatttattagctcccacttataagtaagaacatgtggtatttgattttctgcctctgagttatttcacttaggatagtggcctccagctgcatccatgttactgcaaaggacacgattttacttttcttatggctgcgtagtattccagcaatcttgcctgattgctctggctaggacttccagtactctgttaaataggagtggtaagagtggatatccctgtcttgttccagtttttaggggaaatgcattcaacttttgcacattgagtatggtgttggctgtgggtttgcatgtagggttcttattattttgaggtatgtttctttgatgcctagtttgttctcagggttttttttttttatcatcaaggtatgtcaaattttattgaatattttttctgcatctattgggatgatcatataatttttgttttaattttacgtacgtggtgaattacatttattgatttgcatatgttaagccgtccttgcatcccaggaataaaacccgtttgatcatgatgagttatctttctgatgtgctgctggtttcagtttgctagtattttgttgaggatttttacatctatgttcatcatgaataatggcctatagttttctttttttattgtgtccttgccaaatttttattttaggatgatactagttttgtagaatgagttatggaggaatctcacctcactgatttttcttggagtagttttaataagattggtaccaactcttctttatatacatctgatagaattctgctgttaatctctctggtcctgggtttttttgattagtagattcgttattactgattcagtttcatagcttgtttagggtttctttttccttctggttcaatgttgggaggttgtatgtttccaggaatttatccattttgtttgtgttttccagtttgtgctcgtagatatgttcataatagtctctgaggatcttttgtatttctgtggtatcagttgtgatgtcacctttgtcatttctgattgtgcttattttaatcctctctttttctttgttaatttagctactggtctgtttgtttttcatttttgtttcattgatcctttgtatgatttttttggtctcaatttactttagttctgctacaatctttgttactcctctgttagctttgggtctggtttgtttttgtttttctagttcctttaggtgtgacattaggttgttcatttgagatttttctgcctttttgatgtaggcaattagtgctataaactttcctcttaacactgctttttgacatatcccataatttttggtatattgtgtctctattttctttggtttcaaaattgttttttggtttctgccttaatttcattgtttactcaaaagttattcaggagcaagttgttcagtttatatgtactgatgtggtcttgagagttccccttggtattgatttctaattttatttcactctgttctgagaagatgcttctgtatgattttgagttttgaatttcaggagacttgctttatgaccaagcatgtgatcaattttagagaatgttcatgcacagatgagaaaaatgtatgttccgcagttgttgagtagagtgttttgtaaatgtctattaggtccatttggtcaagagtccaatttaagtccagagtttctttgttagttttctgcctcgataatctgtcttgtgctatcattggggtcttaaaatcccccaatattgtatggctctctgtctctttccttaggtctagggatgattgttttatcaatctgggcactctgatgttgggtctgtatatatttaggctagttaaatcttgttgaattgaatcccttttcattatgtaattcccgctttgtctttttatttactgttgttggtttaaagcctgttttatctgatataggaagatcaaaccctgctcctttttgtcttctatttgcatgatagatctttctccatccctttagatttagcttgtggtcatcattacgcctgagatgggtctgttgaagtttttgagacagagtctcactctgttgcccaggctagagtgcagcggcgcaatcctggctcactgcaacttcgcctcctgggttcaaaccattctcctgcctcagcctcctgagtagctgggactacgggttgcctgccaccacactcagctaatttttgtagttttagtagagacggggtttcaccatgttggccaggctggtctcgaactcatgacgtcaggtgatcctcctgcctcagcttccttaagtgctaggattacaggtgtgagccaccacgccctgtctaacagatggtatttttgtattcattgcggcaatctatgtcttttaagtggagcatttaggccatttacattcaaggttaatattgatatgtgaggttttgttcctgycttagtgttgttagctagttgttttggtagtctcaagtatataattgctttataggatctgttaactttctactaacatatgcttttatagtagcaaatatcatccgtttgtttctgtgtttagagctcctttaagcatttcttataggataggtttggtggtgacagattcccatagcatttgcttgtctgggaaaaactttatttttccttaatttaagaagcttagtttagcaggatatagaattattggctgcagttgtttttctttaggaagtctaaaggccaggtatggtggcttatacctgtaatccagtgctttgaaaggttgaggtgggaggaacacttgagcctgggagctcacagccagcctgggcagcatagcgagactccatctctacagaaattttttttagataagtaagcatggtgacacgtgcttgtagtctcagctgcttgggaggctgaggtgggaggattgcttgagcccagaagttacagtgagccatgactgcaccactgctacactttaggtgacagattgagatttttctctcttaaaaaaaaaaaggccaaactacatccccaatcttctggcttctaagatttctgctgagaaattcactattagtctgatgggatttcatttataggtaatttgtcctttttatctagctgcctttaagattttttttttcttgttaaccttgggtagtctgatgactatatgccttggtgatggtcatcttgtgtagcatatcacagttgttctctgaatttcttgtatctggatgttgacctctagcaaggttcaagaaattttcctgaattattccccaaatatattttacatgttgcctttttttcttcttttctctcagaaatgccaagaagttacagattttgttgctttacataatcccatatttctcaaagactttgctcatgttgaaatttttttttttttatctgactggattaatttgaaagactgttcttcaagctctgcaattctttcttctgcttggtctagtctattgttacagcttccagctgtattttgaaattgctgtagtgaatttttcaattccaggtgttctaattggtttgttttattatagctatccttatctttcatatcctgaatcatttttctggtttctttgtgttgagtttcaactttctcttggatctcgttgagttgccttgcaatccatattttgaattccttatctgtcatttcagacttttcattctggttagcctgtattattacagaggtagtacaatcctttgtgtgtgtcaagacaccccagctttttgtaccgccagagttcttacactgattccttctcatctgagggatctgttgcttcttatttttgaatttgctgtagtttggatgagacattttttattttttaattcttttttcccttgaggatatgactgtggtatatgttgtgtatgattgtttggctttgtttctgggtgctttcgacggggcaaggctctatatggtttccttggttgtggatagcttcagtgcagtggctttctcagatgctgtttgctgtagtgatgtattggatgcaagggctgacacactgcctcccgcagggctaagggtgtggaggtgtcagaaagcttagcatgtgtactagcactaagcccttctggcagcaagttatttatttggtggtgcagttcaggcttcagtctggtagatggagtttaagagtaagagtcagttctccctctgggagatgatgagtggaagcacctaccctgagggaaggatggtggcaggggttggagatcaggttggggtatgctgggtcttggggaaaggaacaaggaggggtgcaccagctcctcatcctgtgcaggtaggaagatgatccgcttctccattatgcccctgtcgtagggctcacaatcttcagtttgtatagactttatcctttggttcctggttacattgtggctgcagaccatggatacatctctctgatggttgccaccaaaatgggctttggccgagcctttcccccaagttcagagcagacaactctgcagcttacctgtctgttgctgggatgctgctgctctgtgtagggagttggagttgggccccaccctttgtgaaagcccaattggcctgagctcgttttcagcaggggtagagccactgcgaaaaaggtgaaaagtttctccaggtacatatgcgctaccatccactgggaagaactgctgctggctgcatcaacaacagtgtacagggggtggacacagtgggaaatgacccctctccatgactgttcctggccctcagtgctacccccttcagtgattgtcactgtgcccacatttcttttgtcccaggagggcccttagcaggctgtgcttacctcccccttaggggcagtccatgccgagggatagatctccagggatcccatagctccctggggactcactgatccccatgagcttgccaaagtcagagcgggttggagtatatttgcagggaatctgatggtatgataactcaagggcagagattcccctaggtagggcattggcccactacagcagcacaaacacagtggttcctgccctctaagtttgggtctgaggggagtactgacatgcctgcatgagctggccacctggatctctgtccctgggaagctcctatatcgccactgatggcattgccctaggtaaggagggcagaggggttccccagcagtttgatgatcaggagattgccacaaggtgagggaagcagagaagcatttccacctaccctttacatggggctttgagttccttaagggacagtctctgccagactctcgcttcttcccttttctgtatcccagctttctcttgtgggctctccaacaggtcctggctctcttcccacagttttcagttcagaagatgtccattcaccagtaactttgatcttttttatgaggacaactggcatttgatgtccctagtcagccaccttgaaaacccatgttcctgttcttaaagctcctcaaggatagggattcactaatttccctcatcatctgattagaatgtttggacctttatactttgaatgatgttaagtgatgttaattggtatggttagatataaaatgaaacatgctaaagtgacattgagtacaaatgtttctgaacattttagcttagaatgatgatactcaattctgccattggataccagttacccaaggtgtcacaaacttttcagaacctcattgtttgaaatttgctttaataagtaaaattatgcccgagacaacactcagaatgagtaggggatgtatatgaaagtcaaccgtgataaggtgtcaggactctagaattgctgtgaattataaaaatattctctttaataagccttcctgtagaatctttgtcaggagttttagaagatcacaaggtttcttttgtgttcccaggctacaagatcaagctgcagagaccattgaagctctgcatgcagcaggcctgaaagtctgggtgctcactggggacaagatggagacagctaaatccacatgctatgcctgccgccttttccagaccaacactgagctcttagaactaaccacaaaaaccattgaagaaagtgaaaggaaagaagatcgattacatgaattattgatagaatatcgcaagaaattgctgcatgagtttcctaaaagtactagaagctttaaaaagtaagaaagtacatcagtttcttatatttagacattggtgtagatgtaaatcacagctgcatatacaaaaggcttcattttctgtaatgcatgattttctgtttgcaggtgttttatccttataagttaaaatcgtccctgaggacttgaataatggcccatctgagattatttggcactttccaccttttcttttaacttaagagaaaactgcacatttcggaaggtttagaaaaatagctcaatttttaaatgtttagagtctaggtattcaatgttgatattctggcctggtccatgttaagaaaaaaatattcctttcacagtctcttaaattgaatgtaataaaatcaatctttatgacaattttcatgcattttgaggttctggagccattttctgtgcatttttataccccagagctccaaatggaatcaaatacttgttaacgtggccactttctttagaggacatggccgctttgactctactttcaactaggaagaacttgtggaacataaaggtgtcagggaaagccactgataaacaataattcagtgcccagagatatattttctatacttcccattgaccaagggtgagctttgtctaaaccaattacttgaatttaccttggccataagcaaattgatttccttttttgaaatgccactggatgtgtctgtactaacttgaaatatccctaagcaatattattttcaatttcttaagcacactttatgttccaggaacagtgttaagggctttgtatgataattattatttaatcatcattaacaacccagttaggcaaccgtattttcttcatttcacagatagagatcacacagctaagaagaagttcagaaagtctctccaattccagatcccatgcttataacaactatgctatatctgtatcctcatcgctaatgtttaagcaagctttaaaaatgattagcccacattcatgaggctgtggccaattctaaaacagctgttgttcttctagtacttgggcatcagtgataataaataggtttttattaattgcctatgagaaactttttcctttagccaaatggtacttctaaagatagtccaaagtatgtgcattttacttctccttttgtcttagtctgcttgggctgccataacaaaataccatagattggatggattaaacagtagaaatttatttttcacggttttggaggctaaagttctgtgattggagtgccagcatggttgggttcttgtgagggcttttttctggcttgcaaatggccgccctctgmtgtctcttcctcttataagggcagtaatcccatcatggaggccccaccttcattaactcatctaaagtcagtgtattagtctgtttttacactgctgataaagacatacccgaaactgggaacaaaaagaggtttaattggacttagagttctgcatggttggggaggcctcagaatcatggcaaaaagcacctcttacatgacagcgacaagagaaaaatgaggaagaagcgaaaacagaaacccctgataaacccatcagatctcatgagagttaattcactataatgagaacagcataggaaagaccagcccccatgattcagttacctccccctgggtccctcccacaacacatgggaattctgggaggtacaattcaagttgagatttgggtggggacacaaccaaatcatatcattctgcccctggcccctctaaatctcatgtcctcacatttcaaaaccaatcatgccttcccaacagccccccaaagtctttcagcattaacccaaaagtctacagtccaaagtctcatctgagacaaggcaagtctcttctgcctatgagcctgtataaaatcaaaagtaagctagttacttcctagatacaatgggggtacaggtattgggtaaatatagccgttccaaatgggagaaattggccaaaacaaagggattagagggcccatgcaagtctgaaatccagcagggcagtcaattattaaagctccaaaatgatctactttgactccatgtctcacatccaggtcatgctgatgcaagaggtgggttcccatggtcttgggcagctctgcctctgtggccttgcagggtatagtctccctcctggctgctttcacaggctggcattgagtgtctgcggcttttccaggtgcacagtgcaagctgtcagtggatctaccattctggggtctggaggatggtggccctcttctcatagctccactaatcagtgccccagtagggactctgtatggggactccaacaccacatttcccttctgcactgtccaagcagaggttctccatgagggccccatccctgcagcaaacttttgcctggacatccacacgtttccatacatattctgaaatctaggtggaggttcccaaatctcagttcttgactttgtgtaccctcaggctcaatgccatgtggaagctgccaaggcttggggcttccaccctctgaagccatggcctaagctctacgttggcccctttcagccatggctagagcagctgcacagggcaccaaatccctaggctacacacagcacggggacgctgggcctggcccatgaaaccacttttcttcctgggcctccgggcctgtgatgggaggggctgctgtgaaggtctctgacatggcctggagacattttccccatggtcttggggattaacattaggctccttgcttcttatgcaaatttctgcagctggcatgaatttcttctcagaaaatgggtttttcttttctgtcgcatcatcaggctgcaaattttctgaactttatgctctgtttcccttttaaaatggaatgcttttaacagcatctagattaccttttgaatgctttgctccttagaaatttcttctgccagataccctaaatcatctctctcaagttcaaacttccacaaatctctagggcagggacaaaatgccaccagtctctctgctaaaacatagcaagagtcacctttgctccggttcccaacaagttcctcatctctgtctgagaccacctcagcctgaaccttacttttcatatcactatcagcatttttgtcaaagccattcaacaagtgtctaggaggttccaaactttcccacattttcctgtcttcctgtgagccctccaaactgtcccagcctctgcctgttacccagttccaaagttgcgtccacagttttggttatcttttcagcaacaccccactctactggtaccaatttactgtattagtccgttttcatgctgctgataaaaacttacccgagactgggaagaaaaagagatttaattggacttacagttccacatggctggggaggcctcagaatcaaggcgagaggcaaaaggcacttcttacatggctacggtaacagaaaaatgaggaagaagcaaaagcggaaacccgataaacccatcagatctcatgagacttactcactctcacgagaacagcacaggaaagaccggcccctatgattcagttacctccccctgggtccctcccacaacacatggcagttttgggagatacaattcaagttgagatttgggtggggacacagccaaaccatatcagttagttactctcaagggccccacctcctaataccacaacactgggagttaagagcttcaacagatgaatcttgggagaacacaattcagtttataacagatgcaaatcccatcatgagggcctcaccctctaaaggtgctatcttcaaatacaatcacattgggggtagggcttcagcatgaatttgcaggggaacacaattcagtctatagcaccattcaacagccctgaggacacttttgtaaaagccagggcttgtggaaaacttaatttactgtcactgtctcagatcagcccatcttcctggttatttgtttggagtcgggcacagtctttacttacttacacagggttcagactcagtcacctttgccagcttctgctcctttgccctttccccttcaaatcagcccccaagccatattcatacccccattctcacctctagtgccccacccacatcagaggtctagtacatcatgcatgaaatcccttaagcccctctgccagatgaatgatctttaagtgaagcactgtccatatcatatccgctctgaaaactttggtggttctccattagtcacagattcaggccacaccagaggccttaagtgaccttttcaacctgcttttgcagtgcaccccaacatacattctattacatcacctctttattccctgtttttcaagtcctactttagatattgcacctcacaaagaatccactattctttcctgtgtggatatgtctcaataactggacatcaaccattgattatcttgtttggttaggtagttctctcatgtatgcttctatcaatctaaggagattttctattctccataaaaagattagtccataattctttgtatttctctatatagtgtgcttatagttggtgtttacaagttatttcttcattggttattgagttgctgttttcagccccataagtaagctattaatatatgagtaggggagcaaagaaagagaacacatcatttatgtctctttatttagtgaataaaattatacagcaaaatatttgtaagtataaaatgttatggtattagcagtatacactgaagaaatatggaataaaggaatgatgaggtatattaggccctcactactcaaagcttcgtctatagaatagcagctccattgtcactgggcagcttgttagaaatgcaaaatctcacatcacaccccagacctaacgaatccgaatttgcagtttaagaagattcccaggtgattcctttgcacgttaaactttgagtatcattaaattagataactgaatctctgagatcctgctttgtctaatgcttccactgtagtggttgtcaaatggcacccaagattccccggagcaaaacttgaataaccacttgtttgtttcctaattgaaaaataaaagttaattggcagaattttctcatttgtaagttttacactatatttttcttaaatacttggcacctgttacacatttgtctttcctgacacctaacacctcttagtcctggctacacatgagaaccacctaggaagcttttaaaatatacctatatataaccaagccctggccaaggtactctgatttaattggtctggggataggccccaggcatgggcaatttttaaagccacccagatgatttgaatgggatggctagagaaccactaagctagtatgtaaaatgatacatttaaagaatatatatatatatatatatatatatatatatatatatatatatatgtatgtttgccccaaagccatttgtcttttccctatattgctagggagtttcagactaattgatgatttgtcttcatagcagagtttgactaattaatttgaattccagataccatacgtttcttatacagagtcaggctgcttaacctcttattttctaaacatcaaaaaaaaaagtttatattagtcaaagttcaaccagaaaaatagaaccagtaaaagaatatattgagagatttattgttaggacttggcttgggcaattgtattatctagctgggcaggtctagatttgtgggataggctcttaggaagggctgggactctcaggcgtgagctaaggctactgccttaggaagtctcaggaagtagctaaggctactgccttaggaagtctcaggaagtagctaaggctactgcatcaggaagtctcagctctcctcttaaaacctttcaagtgactgaatcaggcccactttagttatctaggatgatctctcttacttgaaatcaactgcttgtggactttcatcacatccacaaaatacctttacagcatcacttagacaattgtttgattaaataactgggaaatgtggcctcaccaagttgaccttttagaacttgtagtcatctattatgtgcaacttgggtctcaaagatacgattgcaaatcactgttgtgccattattagaggcagttgcttctttagagtgaacaggttgaggaaccagattgatgactccccttatctgagaccaccccctttgttgtttaaaaaaaaaatctggatcctaaacagaaatctgtaataaatccaaacatagcattgtttctctttttcagagcatggacagaacatcaggaatatggattaatcatagatggctccacattgtcactcatactaaattctagtcaagactctagttcaaacaattacaaaagcattttcctacaaatatgtatgaagtgtactgcagtgctctgctgtcggatggcaccattacagaaagcccaggtaactgtgaatattagttaacgttccattctggatacttctatacatatatgtgcaaatgtttatttttttaaaaaattatttcttcttcaaagggccattattactatctaatttcttcctccaaggcttctttctttttgtaatcagactcagaagtctttccccattttgaattaaacttatgctgcaccttgttgtcccctcaatctggctgtcccagttcctcaccttccagacttttttctctgatgagtgctttgtgcctgctgccactgctcctagatcccttatgacattagctctgtgtgttctttctgctcttcttactcccttggcttgcctgcaggtagacctggcccatcccttgtgtagtcttccattctctttctcatttctcctttgctcttgacaccatcagttatatcctccttaaaattatgctttcatggtctctgtgacggtccatggtcctgacattttatttgtcaatgtagtgactttttattttgtgccatcctctattttctccctaattatctgttttttctagggcaaagttttctctccacttttagctttatggtctctctctggataagcaagtctatttctctgactcccattgataaatgtgtgcccctgactttttcttgacattaagtcttctatttctacctgtgtgctagacagctatatatggattccctaccgtcacaaaaattctggtgtccaacacagatcttaaaattttcttcctcagaccagtttggtttttcttttatattgttcttgttaccagtgccacttttctcttgctccctatgtctcaaaactacctttgatccttctcctctccctctatatatagtcgccatgtcctgttggtcctaccttttgtcatagctctcattttgatgccatctttcaaaaccttttactgcccaactagtccaagcctttatgactttacacacagactatttgatttagtctcctcactggtctccttgctttcacccacccatttttaatctctccacactcccaaattaatcttgttaaaacacaactcttcctatcatacattctttttcggacactttcagtagtttcttagtcccttaggatgaagggcagttgagtgaatgtggcgcctggggctccccactgttgtcccttaacatgtctctacaaattttgtactttgtgtccactatcactcctttctctggtgtacattctgcactcctgttggttgttcttccatggtcttccatatgtcatgctcagggcaactttcaaaacttttgtcacatcatttcctcatctggcactctctctgaattcccctggcctaacacaaattttactcataatgaaacctagatgaagggccacctcctacatgctttcttttccagctcctccagtccaaattgcctcaccttgcttctttgtattcactaggtacaaggaaacttagagtctccattacctactttttcatttccatatatgctataggatattctttcatatgtgttagttttgcttcatcagattctttaaccacttcctctaaacaaggggatggctgtgtctgtggcttttcttttatatactgtgcgcgcgcacacacacacgcacacatatgcacacacacacacacagcgcccatcatatttgaggcatttcttctgtctgccttctagctctcagtccccactgcaatcagaggctcttctttcttttcttcaatcttgtaaaactttcttggccccaggttgggaatcagatccaaccagaatacactattcaaaagtatctgtccccttagtcagaggttttcctgcaaaagcgatctctttttttccttacattcagtgtatgctgctcaaattgctcacctgggttctgactgcttcactgccaggcaggtatatgaattcctgaccccatgctgcttcttccaccttaattatgccaccacttgtggtttagtcctcattctgttttatttctgtcactatagttattttttgcaggatattacatacttagctgtcatgttcatgtatgtgatattcaagtcactatctccaatccaaatatttggtgatctactttactttttcagctgtttcccaaacacatattcttgggtgtggcattatcaccccaaatctgacttctctagagtccaaccatcattttccttggcatcttctttttctatgactgacctcagtgtacttccagatttctagattcaaaaccttgaaacctgtgttgccttcccacataccacatacattaccctttcattgtagtcttagtcactaaattttgtctgtttcttattacatygtcttttccatctattcctttcttttcattacctttcagggctaggcctttcaatagctcattgaactcctggaactagccacctaacttctctctttgcccacagtcttgctttcctccggttcttcctacaccctgctgttgaactagctccagatatttctgtccatgtctcctatatgaaaattccaattgatctgggcaagccagatctattctctcagcatttactgtatttatctggctatgtgctcttggatatgctagttcctttctctggaatactcctttctttctttctcatctatgcgagtcttactaatatttcatgatttagatcaaatcactcgtccttctgtaaaattcctgatcactctggcatgtatggtatcttctcccttctctgacatcctaggccttcttacatggatgacaatatcatacattcctgcacagatgctacattttgttaccttgtattgttaatctgcttatctaatattcttgtactcatgacctaactctactacttcatttatatgctttttaaggtgtgtgatgaaaccttatatctgttttggctcttagcacattcctgtatacaatataaagcaagctattatacttgatgaatagcttttggtaaaatatttttttttttcatgaagctatcctagagattgaagaggtcttaatccatttgatctagggctgagtgaaaaagtccatgtttacgaatctaaatcccttcatgattttatggtccatgattgtatatccttttatctttctacagtggagagttttactctttttagtctatgttttcatgcagaagctgtcacccttgataattttattgccttccctaaaccttgggtgcgtattttttccttgaggtgcaaatcgttactgcacacagtataacaggtgcacttagttaaccattattgtagcctattaaaaacacatttagtttgggttctttaattttgtcttttattctttcacttacaggttatttctgacagtcttctgtaaagtttttaagaagaaccaagttgaggggagggattgggggaagctggcatttcatagtcacatcatttttgtgttaagtggaattggatgtggggttttttgtactatttaatacaactaaaacctgattgaattctatttaaagaaataactgcagggtgccttagcctcatgaattatttttcatcacttcagttatgttgaaaatggattttatttatgttaactggtcagaacaattgtgaggacagtatttttgcaaagcattatttagctactaaattatttttttttaagccgctagattccaaggggttttgtggcttgccacatcaaacagtgattatctaaaacatagggtaagagggcagctgatcacccaatgcacttcccacaagtaactctgccaggaggtttttggagaaccccaaggcagaagtattttaataccagggatgaacattttattcagtacatttatacatcttgaagaaacactcagggaatagcgacaggctttgtacacatatcttggacatctttctgcaaatgtcaacccctttagtgtacctcttttaaaatacagctactcgtaggagaggtcagaccatattgagcagtgagagatttattaaagtttagttggcatccagataggtgcaataatttaacattaggtaagttggaataagggttgatgtgctcctagggaaggtgagagtgtcagcagggaggagagagtagaaagtaaccaaaaacattgttctctgacttcctacttggttctggtggccttatgtatgttaccccaaatcagctttctggcttctactgtcacacattcaacatctgatctgaaagaacacatgatgcaatgaaaaaagaaggaaatgtattgacctctaatatgcatgagaggcaaagtttttgatagttcatatatgcatagaactaggacaagtgggtgctggtgttacattttgaatggctgtgttctgcatctgtgaatttgacactattgtacatattacagttggccctccgtatccatgggtcctgcatccacagatccaaacaactgtggattgaaaatattagaataaaactaaaacaacgaacagtataacaataaaaataataccgattttaaaacaatacagtatgacagctatttacatagcatttacgttgtagttagttactaaaagaaacctagagatgatttaaagtatgcaggaggattttggtatctacgagcgtcctggagccagtcctccaaggatactgagggatgactgtatrtgcacaaactacctttctgtttgcaaggctgctatttacaagtgtgaatgaggcataaacccctaaagtagcccagtcttacattcttctttgaccttttttacacctcttttgtatttaatatttagattgtcagaatggtgaagaatttaaaaggcagcccaataactctgtcgataggtgatggtgccaatgatgttagtatgatcttggaatcccatgtgggaataggtaagatacatctaatgagatggcagctgtgaaaagtatcagtattgcttttaggtagtgtggtcttacattctagagtgactgttttggttactcatcttgaatttgaattttggaatgataattgttaattaaatggaggcctcatctgatcatgcaacatgtccatcccaaggtcctaccccatggtagaaatgtagcaatgtaacaaagttaaaggatatttttcaattagccaagtagagtgaatttcccaaagctactggcagcacaattgattgtttagctcttactttgacagcatgcatgaaatttttattgattttctgcccctggccagactgcctgcttatgttgctgtactatatcttttgacatctcaactgtttggggctaagaaatgataattggttggctgtttttcaacatggcagtattaatgggtggtttgggctgtagtgttgaatttatatattgacatgcaacaacagcttttccaccacctgtaccattttttttcccttctctggttgctattaggcaacacaactaactccccagcaagttagttagctagtttgtttgttttggcagggtggtggggccagatatggaattcatatcttgggaattattgtactgcagtttaggttcccaaactgttcttttcatttggaagtattcctatttcttgtgcaacttgaagtactactcattggttatccaagtgtcaaatggcctaaagctgctcgagctcatagaacccttgcgctgctagtcagggtttcatacatgaaagaatttcaccgtcttctcattgaactcctagaccacaaaccccaggtttctgagttcccttaatatagcacctagtctagcgtcatacacaattaagcacttactgagtgacttaattatttttaagttgagtttttttcttcagataatttttaccttgtaatgattgaaataatgattctatttaattgttgtatactgtattacgaatagggagttaccagttaaacttagttaaattatttggtaagtctcagtgtcactgttaaagaaagctcttttggtttttaaaaaaggaaaactaattgatagaattgaactayaacattaaaccaagttgaaactgtgaagataaatcagggagtcatttattctagaaaatgctcaccatatagagatactctcttttaggtattaaaggcaaagaaggtcgccaagcagctaggaatagcgattattctgttccaaagtttaaacacttaaagaaactgctgttggctcatggacatctatattatgtgagaatagcacaccttgtacagtacttcttctataaggtatgtgataaaatatatgtaatttaatttctttttaatccagcattggctcagcttggtcatggttttgttcttccttttttttttttaatgctgcttttgatatctcatactgaaatttgcagtcaacaaagcagaggtggtctattggatgaatcagaaaccagaaatgccttttgatgcaaaatttttgataggaatttttaagccctccttattgaaatgtaaattaaatacaataaagtgtattcatcaaaagtgtacagttccatgagttttgccaaatgtatacatccatgtaaccattacaccaatcaaaaaatagaacattttggcttggtagtggctcattcctgtaatcctagtgcttttggaggccaaggcgggaggatcacttgaggtcaggattttgagaccagcctgggcaataatatgagaccttgtctctacaaaaataaaaattttctaaaatgaaatttttgcagtcatttctaattgtctataagcatgtcaaccaagagaaccagtggtaacactttgatatgtgaccttgctggtcttttgtctgtacaaattaacatatgtactttttttatacttttatacactatacactacattgaggtttttacaatttttttgagatataatttaacaaaattcacctttttttaaagaaaaattttcttaaagacagagtctcactctgttgctcaggctggagtgcagtggcgcgatctcggctcactgtagcctctgcctcctgggttcaaatgatgctcatgcctcagcttcccgagtagcacatgccaccacacctggctgatttttgtgtttttaatagagacagggtttcaccatgttggccaggccggcctcaaactcctgacctcaagtgatctgcccccctcagcctctcaaagtgctgggattacaagcttgagccaccatgcttggcctaaaattcaccattttaaagtgtataattcagttacttataatgtgttcactatgatgtgcaaccatcatcattgtctaattctaaaacttttctatcatttccaaaagaaaccttgtacgtattggtataatacatattgctttgcactttgcctttttcacttaatttatgttgtgaacatttttctcacccaatttaatattcttccaaaacatgataattgtgcaacattgcaaatccccaatattggacactgaagtagtttcctcaacaataccttggtttccgttttatcaccaagcattagcgtatacgttagactgagtctgcatacttgttattgtctaccagggaatagaatttaccaaatttcttaattagattctagtttgtaggtagagtatttagtgcatcttccaactactcaaatcatatagtatttagtatataattcaagtagttatgatatttgaatttcataccctatattttataagagttaaagctcagcacctgattttgtgtgtcagttgtctatagtcaaccctaggtctttcttactaactttatatttaaagaaaatacatatttataaaactatgaacccagtttcacaaattttctaagaccctggtagccagtatctgctggtagccaggccaaacactgtggaggaggaaaatgatgataatgatgatggtaacccaatatgtgtaaggtattttgtgagttcacaaaatcactttttaaaaaatgtaatcctcacaaacatcctatgagtcaagtagtagtatctccatttaaaatacatggaaagtagagctcagagagatggtataacttgcctttggctttccatccaggaggtgacagagctagatgttccaccatagattcatttactccaaatccaggactttttatgtgtcacagttagggtcttttgggccttgcacccagtaacagcagctcatggaaataaagggttattctctcttgaccttcacctagtaggagatcccttgaagatttgtcatacagatctgcctagtaatctgaacctatttcagaggcttattttgcctcttttgagttttggcctgcaatttaagcaactgccaccagatggaaggaatgctctgttaaggagarcaaaacaagcgttaaaatggcaaatgttgaccagtggttatttatgtagatgatatcctctgtcttcgttagtatctctaggcccattatcatcttggttactgactcagcagtatttcttttttattactatcttttgtgcgaagaggatttctaaaattttcaactctatttggctgagctgagaagtctttccatcctctcgccattgcatcttcaaattgttattgcccactcccggagtacttcagtgacaggtcttcctgccttctgtttctccatttaatcctccttacataattcaactagattagtgtttaaagaatgccacttttcaacttgtcccttagaacctttactctccaccgtctcagctttagtctggcttttaatgcaccccacagtgtgaccctgtcttaccatataagtttaaaatatatacattcttgccttggttcctgccatcaacatgtcctattcatctttattcatagttcgagttctaagttgtttattcaatcrgtgaacaaatatattttaaatgtgttaccatgtgccaaggcctgttttaggtgcttgaggatacaccatggaataagacaggcagtgtcccttttctcatgagacttacattctggtgggtgaggtagatacctgctctcccttctcaatggarcatccccatgatccccactgagctctacctgcttcaacctcagaacacttatttttttcataaactgtgactctaggaatactatggactatattttgcattgtaccagaactgataatgtataaatgagtgttgcttttccaggtgatgaccttgggagctctgactcatgctgcaggggcaattcaaaacctgttgagctcatttctttagaaacatcctccagagccagtagtacattgatcgaaatatcctcagctgtggtagatgttcatcttttgaggttgcatttgatttttaaaaacagtctcaagtctcctagagctaattctggagaaattagctgacagaagggaggagactggttttctggcatgactggaaagtgggctcttgaaggggcttcttgaagagaagttcagagacatcatgaccaagtaacagtaaaaaagctcacagcctgctttgaaggatagcacttatttgaaaattctcgtgctggtagttttgcttaaagacattactttcagtattttataatcacacttagtagcttttactaccttatgaattcccagcttgtgtttcttttctgcttgtctttttagtatttctcaaattaaataataagtcccttaggacagtggtccccaacctttttggcaccagagacctcgggccctaatgctcacttgcctgccactcacctcctgctgtgcagcctcgggggaggggcgggggagccctgacttaggaaaaagaagttgactctttttttgttatcatctgtgtgccacctttgtgtgtagtagatgctcagtaatgatatgttgattgtttgatgaggtagtaataaaggcattaaagcgttagttgatattgttagtgtcaacataatctataataatttcccaactatttattggcattaattgactttaaatgtacacttacagcattgtcagtctactatatgatttgcaaatctaattggtgttaaagatacagtatcattaggtgttcatattggaggagctcatttatttcctggaagaaggacagcaacagattctcataaagtaaataagatcctcttctgccttgatagggcaaaagttggccttaatatgaattaatcattgttttagttgtttccttatgtctgtggaatagaggtttattgcattctgacattagaaggatttaggaataattataaactatttggaatatagtttcccattttagtttagcaagttgattaagtgaaaatgttaatccttgtcttaatttttttttttcagaacctttgtttcattttgccacagtttttgtaccagttcttctgtggattctcacaacaggtttgtttctcaagttattcgttataatatagtttacatttgctgttaataaattacccttatatattagatttctagagattagagatgtatgtacaaagtaaaatgatctcttggttttgacaacagcaaatgtttatgtctttgcttttctagttttcttattgttaccttcattttgaaatgcttttggtacatcctgttggagttgtgataacattaaaaagagtattttgaattttttctttttatcaatgtataaaaagtgtttcataattctaaaatgttatagtttaatatttcatcaaatggaatctcccaactttgcaggctttcaggttagttttatagaaaagcattaatctttaagctagccaagaacctgtgattcctagagaaagctttggattacgtaaagcagctatagatgttttgccttctattgttttctgaacatgtattacataaggaatatgctatatattaacttgatacataagtggtaggatggcgagacatctttgttttaaaaactgaaatggatttggcattgcttctagtgggaggtatagcgaaatacagcgaaatacaggagctatagtactcagtgactcagaaattttataattaatctatgagaagttcagtgattttgccaaactgagctaccacattgccataggtgttaagtttctaaatttcaaaggcaagctttatatatgcttctgtgaatacaaagtacacttatgaatacacttatgtattcttcttgggtcctcctggtaggaagtgattttttcctaattctttggcagttttttttttttttttttttttttacttttaggttcaggagtgcatgtgcaggtttatgtaggtaaactcatgccacaggagtttggtgttcagtttattttgtcacccaggtaaaaagtatagtacctgataggtagctttttgatcctctccctcctctcactctccaccctgaagtagactccagtgtctgttgttcccttctttgtgtccatatgttctcattgtttagctcccacttataagttagaatatgctgtatttggttttctgtttttgtgttagtttgcttaggatgatggcttccagctccatccgtgttgctgcaaatgacatgatcttattttttatggttgcatagtatttaatggtatatatgtaccacattttctttatccagtctaccattgatgggaatttaggttgattacatatctttgatattatgaagaatgctgcagtaaacgtgtatatgtgtctttatggtagaataatttatattcctttgggtatatacccagtaatgggattgctgggttgaatggtaattctgttttaaggtctttgaggaatcatcacactgctctccacaatggctaaactaatttacattctcaccagcattctgcaagtgttcccttttctctgcaaccttgccagcatctgttacttttttgactttttaataatagccattctgactggtgtgagatggtatctcgtttttgttttgatttgcatttctctaatgattagtgatgttgagcgttttttcatatgcttgttggctgcgtgtatgtcttttgaaaagtgtctgttcgtgtcctttgcccactttttaatggggtggtttgatttttgcttataaatttatgtaagttccttacagatgctggatattacatatttgtcacattcatcatttgtaaatattttctcccattttgtaggttgtcagtttactctgttgatagtcatcttcttgtatgcagaaattctttatttaattaggtaacatttgtcagtttttgtttttgttgctattgctttcagcatctttgcgatgaaatctttgccagctcctgtgtccagactggtatatcctaggttatcttccagggtggttatagttttaggttttacatttaagtctttaatccatcttgagttgatttttgtatatggcataagaaacgggtccagtttcaatcttctgcatgtggctagcaagttatcctagtgccatttattgaatagggattcttttccccattgcttgtttctgtcagctatgttgaagatcacatggtcatagatatgtggccttttttccgggctctctattctgttccattggtctgtttttgtatcagtaccatgcggttttggttactgtagcctgtagtatagtttgaagtcaggtattgtaatgcctccagctttgttcattttgcttaggattgccttggctatttgggctcttttttggtgccatatgaatattaaaatatttatttctaattctgtgaagaatgtaattagtagtttgataggaatagcattgaacttgtaaattgcctggggcaatatgaccattttaacaatattgattcttcctatccaagagcatggaatgtttttccatttgtttgtgtcatctctgatttctttgagcagtgttttgcaattttcattgtaaagatctttcacctcactggttagctgtatttctaggcatttcattatttttgtggctgttgtgaatgggattatgttactgatttggctctcagcttggatgttgttggtgtataggattgctactgatttttgtacattgatttcgtatcctgaaacttcgctgaagttatcaggtcaaggagcttttggggcaagactatgaggttttctagatatagaatcatattgtctgcaaacagggatagtttgacttgctgtcttcctatttggatgccttttatttctttctcttgcctgattgctttggctaggacttccagtactatgttaaataggagtggtgagagagggcatcctagtcttctggtttttgagggaatgcttccagcttttgattgttaagtgtgatgttggctatgggtttttcttagatggctcttattattttgaagaatgttctttcagtgcctcgtttgttgagagtttttaacatgatggattttattgaaaaccttttctgcatctattgagatgatcatgtggtttttgtttttagttctgtttatgtgataaatcacatttattgatttgcagatattgaaccaaccttgcattctagtgataaagcctgcctgatcatggtggattagctttgtgatgtgctgctggtttcagtttgctagtattttgttgagtatttttgcatctatcttcttcatcaaggatattggcctgaagttttctttttgttgttgttgttgtgtctgtgccaaggtttccgtatcagaatgatgctggcctgatagaatgatttagggaggagtccctccttctcaatttttttggaatagtttcagtaggaatgctacagatcttccttatacatctggtagaatttggctgtgactccatctggtcctgagctttttttttggttggtatactttttattacctttcagtttttgaagtcattattggtcttttcagggattcaggaaatctctggttttctgactggttcagtcttgggaggttgtatatgtccagaaatttaaccatttcttataggttttctagtttgtatgcatagaaatgttcatagtagtctctcagggtttttgtatttctgttgtatctgtagtatcatctgctttgtcatttctgattgtgtttatttgaattttctcttttttttctgtattagtccagctaatggtctatgtatattattacattttttcaaataaccatctcctggatttcttggtcttttgtatggtttttttgcatctcagtttccctcagttcagctctgatttgggttatttcttgttttcttctagctttggggttrgtttgctcttgtttctgtagttcctctagttgtgatgttgggttgttaatttgacctctttctaacttctttctttggtttccttttcttcttcttttcttccctttccctttccctttcttttctttctttttctcttgctctgtcacccaggctgtaatgcagtggcgtgatttcggctcactgccacctccacctcctgggttcaggtgatttctcctgcctcagcctcccaagtagctgagattacaggtgcctgtcaccacacctggctaatttttgtattttattagagatagggtttcagcatgttggtcaggccggtcttgaactcctgacctcagatgatctgcctgtgttggcctcccaaattgctgggattacaggcttcagccactgtgcccggccctctttttaactttttgatgcgggtgtttagtgctataaatttccctcttaacacttccttagctgtgtcccagagattctggtatgttgtatctttgttcttcattagttttaaagaaattcttgatttttgccttaatttcattatttacccaaaaatcattcaggagcaggttgtttaatttccatgttgttgtatggttttgagtgattttcttagtattcatttctatttttatcactctgtggtttgagagtatggttggtatgatttttgtttttttgaatttgctgtggattgttatgtccaattgtgtggtcgattttagagtatgtgccatgtggtgataagaggaatgtatattctgttgttttgggggtagagagttctgtagatgtctgttaggtccatttggtcacatgttgaattcagggcctgaatatckttgttaatttttggcctcagtgatctgtctcatactgccagtagggtgttgaagtctctttggcagtatttttaagagaatgcattcttctcaatgggaatgactggtctctttctcttgaatttgcctttttactatttggtatgctgtctcttacatcagtgccatgtcattagcccagtagtgccagttaagcagataatctttcattataaattaagcatcttgcagtttttggaagtgccatcaaccttcttgtattcaaaattaatagtattagagagtttcgtaagttctgatcaatctgtttttcttgaacattcaaattgctattgagcaaaatgttgctaattccttactttcttggatggatgcaagtattaaaagtatatttgaaattctcttaactaatgtgtagcagtgtgctaaaggtaagttggcttgttctggtggaaatattgttttcattttgaaaggagtctgttgctgtattatccttttaaaatatgtttaccaagcacaaattttaggggaaaaaggactcattccttacaaagccagctgagatttaaaccgtggattgtcttcagtcttcttagattaccttaactgcttatggttccataggagttgatgtttggctccttccgttgctcaactggtaggttcattcatttggcaactatttcttgattgcctactttgtgccaggctaagtgctgagaatattgcagtgatcaaaataaacttccttgcccccatgaaacttgcagtgtgtagtgatagggtgaaagacaacaatcaaatatattatgttgggtactgatacatgctatgatggaaaaaagaaagcataataaagggatagagtgtgactgggagagagagagctgccgttttagacatctgaaaaggtctctctgatgaggtgacatttgggcagagacctggaggtaagggaaggaataacgtcgacatcttaaaggaaaagtgtaccaggtaaaaggaaggtaaaagagtaccaggagagctcaggaggtaatgtgatgtgcaaaatctttatttttgattttggttttgtgctagtgctgaatgtagcaacctttattgcaaatatctttggagtacctttgagtagtcagcctttttcagtccagaagcacattaggcattctctggaacttgcgaggaggactatgaagaatgtagaaatggaccaggattcagattctttacacaaaaagcttccctttctttagcaaaactaggatactaaatgtcttttttttttttttaatgaaaaggaaacattgtaacaggtttcataaaaaagcagtattatcaactttatctgtttgttttggggatattctgtctcttctaattatgtacctaagaattacaattatctgtcatgtgattttaaagtaccatagtgaaacaaaagtagattgatgcttcttttgtttgaatgaaattcaagactaaatgacacaccagtcaatctgagttgtattttttaaatttactcattagtgaaaatgagtagcttccaaagaaaatgtggtgttatgtgccacggactagtcctctcctttgaaaataaaaaggaatgcaacacttttttttgtacttcttaattcagtggaatatctttgctgagcttaaatctttgtttatagaaagtacgttggaagtgtcttttaacttcatggagaatgttgcatccattatcatttgctttgtctctcctgccagccagagttgtagtcccctcctctgggtttccccagctccctgtgtacctctcattctgcctctccatctagaatttgaactccctggtggataggggaggaatcgtctctgtccctagtacttgtcatttagtaggcactcggtaaatgttctgaagtcaactagtgaactaactaatgcaccattcaagtaattcccagccttttgtaattatctttagtagccattgattgaaaatacattattttgttaatttgtgtcatagtttaatgcattttattaagggacatttatacatgtgaaaaatacatatgagtatggggaattatttattcaggccacagaaaatgtttgtttgacaatctttagcactgtgtagataaatactgatgtaaatgctttcatcagaatgaggttcatagaatactttaaattttttcaataaaggaagatttataatatcagagcaggcctttataaatgttatagcttccgatctatcctcattcatttattcatctagtgtttattgattgtttttgtatgccaagtcctgttataggagctcaagattgtccaagttctccagtcaaagacccccatgaacacacttgtagttgatcaaattaggtttattactcagttcaggaaggaagaacacatgccatgaggaactgtgggacttctcaggaagaggatgttagaaaagacttacacaatttggacttgaaaatactaaccaaaaatatgtaaaatattaaccaaaacatttgtgacacaggctggctgctgcctgtatttagtttctctgaggattcctcacttatacttaatggtctttgctgaagtaactccagaatagctagttttagctactaagcaatcttgaaaagttgttcatgtctattagaaatgcagcttatagcatgtaaacattctgaataagattctgttaaaggggaggtgtattaatgtgacacatcacaatatgttagtttcttttttatagttactaggcagtgaccttatttacagattcctttgccactaccaaaagcatgtaaaaaaatttcttattttagctagtaagtttttcacatacataagtatcatcttgtagatgattgttacatgaaatttctttctttcctctgttgtttttcattttagccactgtatgatgctgcttaccttacaatgtacaatatctgcttcacatccttgcccatcctggcctatagtctactggaacagcacatcaacattgacactctgacctcagatccccgattgtatatgtaagttaaatatatagttaaaaccccctaagactttcagtgttgtgattttcattttatctgcagatgggaagaacacagaactgtgcacttggtttgtggtatgattatatggttctgtttggaatttttagctattgaaagcagactgctcaacaggaaaatgacatatttcctaggtgtgggttctgtacttgaatatatgtgaaacatttagttcagagtcactaattcctaaaacttgaaactatattgtcatagtgttctagtgtctcatgggaagacatgatattttaactgcaaagaaaaaaagcatacacaaagatcttctgtagtttagaatattgattcctacttgttgtagattgaactgatgaagttatattaccctttctcatgtaaactgcacccatagcattagccgccccacaccccacctttgttagccccattctaaaactgttgaagaaaataatggactcataagccattgtattcattttgtgtcagttgaaaatggatgcttttctctgtggatgggggacttggcactagccccagttgtttaacttatgatttaattggatttttagaattgtagcctacagctaaggataaagatattaatttatagcagattgtaagcattgctaaatagtaggtagcaagtgcaatagagaggtttggatggtttatttgtatgaaatgaagatacacaaatttaagggattttttttaaccagcatgactcataaaatttacatttagcaattgttagaattacacagttgtgaaatttatcattttaaaggtctttattaaggaaaatttcagacatacataaaagtagagagaatgctatttatataatgaatgaatgtaaatagttgttgaaccactcagcttgtcctaaccactcagcttcaacaactctcaattccttgacattcctattccactgataaccccgtctgctctatcacaggcttattttgaagtaaatctcaaaaacagttatttcattatgcatctcttaaagacaaggatttttaaaaataataataccctatcacttaagtccttaatatcaaatagtcaatggtcacatttctccagttgactcatttcttttcatagcatgcttatttgaatcaggatctaaagaaggtccacacattgcaattggtttatatactttctgagtctcttttaatgtttaggttaaccttgcaatttatttgtggacaaaaccagattatttatgttgtaaaatttctcccagtctagagtttgctgattgcatcttcatggtgtttacatgttctgctgatcctatatttgttgtaaatgcataattagatgtagaggagaatcattagaactttggtagaaatcttacaagcatcagctcctactacactctttttgaaaataaggaaccagggccccgaaatgacttacctaaggacacagggtacaaccagatgcaaaatgaagatcagaattcaaccctcttgccagtgctttttccagcaagccagtggttttaaaacattgttttaactgtagttgtttccagacaacttctaaagtgaagcccgatagtgcagttgctctggttgaaatggggtttgaggagtagtaggcagaattcctcccattccgtcccaccaagagctcagactaacacctgggctgaaagcctctgctacttaccaggtgaccttacccaggttactgcaatgtgcctcagtttcaccttcagtaatacatgggcaacagtagcacctaatcacaatggttttgtgaggagtaaatgagccactatgtattaaagaacttaaaaaaaatagtgcctgacaagttttcaagcaatgatagctattaatcttattattattctaacaccctcctccagccttcagagctgtgctgaacacttgtataaattaagaatgtgaaaaatctgcaaaaagctgttgagtacaaaatatcataagggtttccataaggttttagtgactgtgctaggtgtaggtcatgatttattgaattttgcgtagacttgccacatctgatgcaaaaataaaggccatggcatacctattgccgagcccaaagtgcggctttcctttttgatctcatacttgcaagttgtgaatgcctgctctgacaagacactgctcttggcctgtcaccagactgtagatagtttcattactctgactgttcttttgtgaacatgaagccctggtcttcctatatggctctctgtacagtatgccaattaatattagcagtggcgttgtgtagtgtattatagattttacctttggtgatttagtgacttgggtattaccaaacacttggatgtgagatgacataattggatgcttttatatttttaagagaaatgtaagaaataaactagtttttctatagagggaacaggtgtaatttgtttcttctacagctttaaaaggcaaaagaaagggttctggtatacctgctgcctaccataatacggaggtgctcaggcctttgctgctcatcaacctctccccagatcttgattctctctcatgctgtccttcatgttgattgccccattctgagtttttgacagcttctttattcgaatgcagctagaaagcctgacctataattcaacatatcatgctgctcctgctcttttcccccactgaatgtgatataattcccatcgatggtctgtaaagacaggaactacttcctgcttttgccctttcttccccagcccaagtcagtgactgtcaaaagccacattggctggcagttgttgggcactgcctgcaaggatctttacggaggtgccttacctgtggttcctagttgccttggaaacatgacttactggctatagggagagcttgtttctgggaagcagctacctcattctgccatttttctaggacagagagcataccctgagtttcagatcgctgcatgtacctggaaaccctagtaggtagaagttgcataattgccatgtgcacgaagccccacagtacccaataccaactgaacaaggattagttgcatttatattacaaaggtgtttcttacttgatacagcccagtgacattcttggtagtattagcgacaagtatgttatttgagtaattagatatcatttattaaatgttaagagcaatttgaaatagaatccaaaagaaacacatgcaccaacccatctttttctgcagctctgctccattagaattggtagccttatttagcgttctgacttaggctgagaaggttgtgctatttttgacagatttaaacttaatctatccacctcccatttatcaaagtatcattatacaactgcaaacatgttatttgacttgatggaaaaatataaagggcaccgtaagacctaaaaaaaggtgaaatttccaggagtaaatcttgattaaaataaatattgtaattgttcttggaaagcttggtagcttggttgagagcatatgctctgaagtcaagtcaatccaggattgtatattagctcagtctgttaccaagtgaactttggcacggctgctacactagtggttcccagactatactgcacattgaaatcaactggtgggctttaaaaatatcctgacctccaggttataccttatgccaattaaatcagaataaagatggcagccaggcattagtagtttttaatgatcctcaggggattccaaagtgcatcaaagtttgggtaccattgtgttacacctttctgaggctccttattattagcaaatgtgagtggtagtaatacctatctcatgtttttatgtggataaaaataatgtctgtaaaactgtgaacccagttcctggtatataagtaccattaaatggaagcgaattattattgatgttattgttgtcagtgaccaaaaatttggaagagtttagagagtttactccagtggctgagtcaggagatgattgcatgaaggtcagcctttggctcagtctgaccctttaccaaaaatctgtcaggccattaagggtagcccccttcattataacagggtcaaattccacgcccacctttgacatttcactgtatgtttaaatgaaaagtttcactaatggttttttccccccatttctcaataggaaaatttctggcaatgccatgctacagttgggccccttcttatattggacatttctggctgcctttgaagggacagtgttcttctttgggacttactttctttttcagactgcatccctagaagaaaatggaaaggtaaaaagaacctgtcattacatcttttggtattataagcatggcttgtctttttcccataggtgctggatttgtcatatacatactctagctgtaatcattttacaaactttttctgaagatacagtagttagttctcacagcttctttagaacaatagaagtgaaataagaaatcactttctgtgcatggctaactagagagcttatgtgcaaactttctggaaccttaacttggctgtaatttttactagatgaacagagttcttgggacttcagactcctgctctttgatgtgagaaaggtttttcccattttaaagtaaagcctggccgcattcagtttttactcatagtggccttccatgcttggagctgaagcgggtagctgccatatctttggagtgttggcccaatatgtgaagagaggaattctcttctctccctcctcttcccaatggaagcacagtattctgcagaaaggctattctggtcctgccagtgtcytcccagaacatgactatctcattcagcagttgcactggggtaattttgccctggctgtactctaggagaaaattactgatggcggggacagctgaggcctttttctgcagccacacaataggaaaacaaaaacactaccttgcatactgctttcactaagttctcctttgctatttctgagattcttcttttatggtcattcattctttataatcataatgtgaaggaaagctaaggttcaaaaagaatttactgaggatactatgtctggaacctggtaacacctgttacagaagtaataggttcagtgaatttgaatggtactttaaaattaggcactacagtcaaaacctctctaatttggactaacaaaaatcagtttagtatgaatccatgaaaattattaatcataaagtacttgttggggaaacacagatctgctttaaagtagtcacatgtagaacttgccaaagagaatgtcctgctaaatcctgtgagtacttgggaaaatcacatcagtttcccaggtcagttttgcccatcagtaagaagaatggatttgattttatgatttcctggcctcttcagatttataactgattgtgcagctttcactttttatgttagttttatttggcagacagattttatgtagctggctactgcttaaaaggagtttgctccaaagtaggcagatactctcctatagtcgatgtgattcatttgctcagcaaactttccaggtggtgcatgagagcatcaattcagcgtctgtttaattcattacccattttgagttcataaagtccaaattaataaggttttactgtatatgtcaccatccctctaaatgtttgctgaaattacagtaagtgtatgaattacttttagcaacaaaacataacactcatgtatgatttgagtgaatccttttttttgcttctattaaccttaatttttgtttttatttttttgaaaaaaccttttacatctcattttctgttttaatgttacgcattcagatcttgacagcatttggtaagcatatgtgccattcattgccatcatttggatttatacatggtatctgcttttttttttgatgtgcacatgctgatagctcttgtatttacagccaaaaaaatcagactcatttaaaaaatgtgaatccatttgtctataaattactgctcatttgagaggtttagttctatattataggaaaatcccatatcaaattctttagagacatgaatcatccaaatgacttgttttgatgaacattgctgttagtagagtagttgccttctttggcctttatcacaacagtgagttccctcttcagtgctgcatggagtaatagaaataaaccctaccagccacaggtgtggtgtacctttttgtgaaaattggatcacaggaaaatctggcattgtggcctgatcttactgactagctgtttccctaaacaattcatacaaaaatatttggcacttacacacaggattcaacttggctttttttttaaatgaaaaaatactaagataatacttgtatatacatggtacatgtaattattaaatgtttttcaggtatacggaaactggacttttggaaccattgtttttacagtcttagtattcactgtaaccctgaaggttagatttttacttattcatgtattttttaatactgtttttrtaatactttcttgtcttatcctaatataccatttttttgtctcctttatttcttgttatgggttgttattcaagtgtttgccttaatacttactaaaatgtgtatgatactagggatttgggtatttgtatactattttttgatcagttttttccccagtatatcgtaatcctctttatattgttttacttaaaaaaattcaaacaccatacttatgtcgaaaatctgtttcttctttattgctgtttttaaggcgttatgataagtggcatataaacaggctgtgggtgagagtgagagagagagcgagagagagagagagagtgtgtgtgtgtgtgtgattatgttaagtacttgaatcttctaaaaattatacttctgtttaagaaccccaggcctaaaataggtatatatgagcaagataatatgtgaaaaagagcttggtagtagtgaaatcttataaaatgttttcatcactgatggccaggttggtggctcatgcctataatcccagcactttgggagaccaaggtgggcagatcgcttgagcccaggagttcaagaccagcctgggcaacatagcaagaccctgtctctatttttatatatatatatatatatatttttttttttttaatttaaaaataaatataaaaaaataaaaatatataaaatgtattcatcattaaaatttacccatgttagtgataaagtgcctaagaatataatgcaggtaaacaaaagggaggtaattttggcaaaatcattggcattgacatgcagccatgtgataatgctgtgaagcctcactgaatgctacccttgaggcccatgatttgggaatctcttatagttgaaagcataatcaaattatttttgtcattccaataataaacacctcacatgggttccatgagtaaatacctttaaatgaattctggcatgcccaggggttagaagcagaattcagaagtataattgtcaaaggatctctcttacctttccctctaaatttttgttcctggtttatttcttataccagatagagctaacatatgtttgctttattcatctatttcagtaacattttaggaccttaaaaggacattacaattcatctcagtatagccacttactagctgtgtgtccttcggcaagtaactttacctctctgtgcctcactttcctcttctataaaatcgagatagaagtagcacctaccctttttgaggactcaattagtgaataaagcacttaggagggtgctcatttcaatatatgctagttttcggtttttattatgtctcacagtatcacaatttgaaatggacgcctcccccctccttttttcccctggccttgcatatagccacagggcttccaaatggccttcacagtgtttttcaagtgtatctcaaagacttccactccctcctctttggattaatattagtattatctttggattcatattagtattttccttagcaaccagaagaatagcaattcaagactgagctacattaataatgttatcaacatcctgtttataaatgagaaactataacagagagctgatgaccatggtgtcacagcaagtaacaaaactgagacaccatctcctctataaaaattaactgctctggatattagctcatgtgacccagaagttttaagcaagcgaaatagtccatacttttgtttttagatcacatttgaaaaccccagataccacaatctgaaaacatgattggtcctggcagaaacatgaagagattaaaatctaactgaatattttattaatttaatggactagatacaggttttgcaattggaaagatacactacatagtcaaacccatgattcattgctacatgatgttagatgtatagagcctttgcatttagtgactcccgtctgttgtgtttgagctttcacgacacctttgaaagttttgtagtttgtctacccttcctagctaccccttccctctcctacttcttttcagcttatctgcccccaccagctaggtctccttttgccatcatcttcctggctgccattgcctgaggacttggggcttgggcctcctagatattaccattacttcattccttgcccattccccagtactgagatatctgcagccctacacctactagctacttagcctgatcacacctccagcctgtacgccagtttagaggccttagggcagagctcagctttctcacccttgttctttgaaaaacctgggttctgtttagttcccctcttctctggatccctggcccaagctagatcctttcataggtatcattgtgtactagttatcagatactatagcgtattgcctggtgcaattcgtaaccgtcgtgaaatcttttgtgttgtatcttttcagcttgccttggatacccgattctggacgtggataaatcactttgtgatttggggttctttagccttctatgtatttttctcattcttctggggaggaattatttggtaagcaattgtacatgtgtgagcaatatgtaaatagcaaagtagatacatgtgtatgtacactatatatgtaagcattcattatactttaaaaattttaattatataagatgacacrtctttaatattaatggcctgaaggttatttgttagctggtagtgctactaatttcaggtaagattttaaatacacrtatatagactgcacaagtcactcagaagacctccctttggtagcttctgtctgtttgaaggtgttgtaaacatctctctagtgaaactatagttttcagcacaacctctcgtgattttcagaggaaatactcatcctgtgaagtttctacctgatatattgaccaacagatacattattgtccatttggacccttattttctcttgatagtatataaccatgattcatgttactacaggtgtgctcagggtataggatatatacaacttaataattcagagggttgtattttgaaattgtcatcttactgttttggtggaggagggaagatgtagaaaggcagactctgcagcttgtctttaaagttcatttagttcatcttggttcagtagatagatgtttgttcagaatcagttttgtgcttgagactctatgggttagagagatgactagactgtactcaaggagaatagagtccagtgagggacacataagctgtgattgggagagttatatatttgcatctcctttctttactcccaaaaacatatattttatttttaaatgtcagagttgttttttttagtgaatggcttcccctgacaaggatgccagcagcagagagcatggctagagcaagccatagtgtaagatttcaggagtacatattttcattgctttgagcaaaatcttacatacaaaatgattctattttatcacagagatgtgaggcttatgtttatgtcccttgagtcttaattagaagaaactctattttgaaaagctttttaaaaataaaaaccttaagaaataaaaatatgagaaacctaatcatttaaggaagtaccagctttaaaaagtataattacagcatatatttggtacctctataggtaattgagagcaatgaagctggaagaagtctctattttctttaataatataacaaataattcaaagttgattaagaacataccatatacaattgtatgtctgcccagagtaccataattctatgaatctatgtaatcagcatctgaactaattatgcaaaatttctacaaaaataaaatgtttccagcgaactcatttccaaccctttctacagactattccttattgatgaaaataaatccagtaaatgattatggtattgtcacacctgtttattcattagtgctactaaaaatgaaatgttaatctattttttattttattgcctgaagtattatcattaagtagagttgagccactgcatgaatataaacttataaagcaaccagtaaaatgtgactagaaacaatgtgaaacttcagctgaatgtggtcacaactgatgtctctagacatgttttaccctgaggcattgagtcacacccgtctttggggttgggtagtgagaatgatgacttccgagccccaaaccacatccagaaataatagtgtttattttttactgccctactacaaaactccatagatgacatggaggttaaaaaaaaaaaacaaaaaacaactggatgcattagtcagaaggtatgatgccaaggaacactctgtgactagctgccatttgtcatctgggcccctgttatggctcagttaactgcctagaacattattcaaggtgttcttcasaatttgagtgaggtagagttctgcagaagtcttttccatgtggcagacttttcccagaaagcctgtgtagcctaggcctcataaatttttctaccttcctgttctcacttttattccacaatctaattttcataaaagtagagccacaaactcagttttatcatgttacataagggtgcatagacattaatttttaaatgagaaaccaaattatcttcaggaagcatgatgtgtcatctaataaacaggagccatggttatctacctggagctctttaatcctagggcagtctgatgtgcatcctgtctttaagcaaccacttcttccccctcaccttcaaagaacaatagcttcacctactgaggctctctgtggttcagctcagacagaagggaagggaaacaggctgtgcttctcaatggccactttacaatgaagtggatgactcagaatgaaatctaactccagaatgggggttcctgctggatttctggattctaaggcttaatgtccaattagcaatattctactctgtgtcaacctatttggcacatactgttaatatatatttgtggatgacaatggtagattccttccatttgagagagatgataagcttctactgtcctttttatatttacatagtgtttttattgggagagagttataaaaatgtcttttgaatttctgaatacagaacacaaatccatccccatcttaataaaacagctgaggaaataaaatgcttgttaggataaaaatgaaccatttctcttgaatatcttttaagcaccagcattttctaatgcacataaatagtcgccagttggcagctttagaattgattgcctgattgtcttcaagtcaaatgcattttatcttttttctcctttgattatcattcctttttttccaaacatttggtaaatgaaatttgtttattactttgggatattctagagaaaattatttttattaatgtatgtaaggaagattctttttaaatacaaacgacattttaattaaatgtccatttcatatgacaggaattgatttgtttttccatcatgtattttctttccactgcaggccttttctcaagcaacagagaatgtattttgtatttgcccaaatgctgtcttctgtatccacatggttggctataattcttctaatatttatcagcctgttccctgagattcttctgatagtattaaagaatgtaagaagaagaagtgccagggtaagaactaagtttatcttacaacctgatttttggaaggggcctcaatatctgccatgagctaaaaacctgatttagaaaattacattagttacagcatgttaaacccctccttacaggttcatcacttaatttcctcttctgcataaaaagtatagtaaaaacttcgttatccaatgcaggtggtaagtagattccttaatagtgttctatgtgaccttcggcaatccatatggagtatctcatatgctccatatggaattttaaaaggaaaaaattattttattttgtatttagcctagaattttcacaccaggaatttccacaccaacattttcgctttaaacttagaaatttccctgtgggctgtttgcagatttttttcagttgataataccaatttgcctctttcaaacctttccccttcctttaattatagtgctgcttaatctctgcgttgcttctagccctgtctgtccagcagtatatttgaaccaaagagaattccctggatgtggttttgacatccttagcctctggaacacactcgtaaaaattcaagatagttttatgagtgtgtttttatttttcctattaaattgtaaatttcctgtgggaatgagaagttattttttctgctgcctcattatgatatcttttaaacattttttaaaaagcctttaaagcgaaatagggagatgagcatggaaaataaaacttttggcagattttgaccaacaggctaattaaatatgtcatattcctgccaacagtagctgattttattaaacaaaactgtttctgtcatattgacaccaactagatcttgtagcacctccaaggcagtattttcaggtaatattctaagctatgactacctgacttatttgataaatttgtcaaccagtttagccacaaaactgttacatcatgattttgtttttgcctgttgaattgatagaatccagtagttgatattacatagacatggggatctgaaatgattagagtaggaaaaccttcagtgattagaattgtaaaagaggagattcatgtcgcaagtcagtgtcagccccaatcaaaaacaagagaactgtcatagggtacattgattcttcatatacaaggccagtcagtgtgtaattaggtggccagaattgcccttaactccctgctttctacatgtcttatgggctgaaactgaacacagtaatgttagcttagttacaactgctttactctagtctggtgttttaggatggaaaagttgcattcaaatacctgattatgtcttaatatcggttgaacagggataaaacagtttgatacaacagactccacccagaatgtctcaagtggcaatttgcatgaaaccaaataaaataatgttgcaataagaaatgatttggggctttttataatagagaattttccagggaaagatttccaagttgctcttccatccttatttgggagtatactttggaatgatcctaaatgtgtctcttatttgaggtaatggagctcattttaaataatgactcacacccagctacatggtctaaagatgatagaaaaatctcagaaaacaaaactttcaaacatgtcatcttatcttcttccttattaggccctctcaaaaaagttagacattggctggaggtgactgttacatagaccattaaattgtgggatgctactaagcagtcacagataaagacttagaacatttttttttttcacacgaacagattctgaacttctgttgaaagtacggagttctgggactgcgtccttttttacttagcagcatagactgttgccaggggtttagcatgaaatttgttatgggttatgtccagcgtaggaagaattctagtgtctgtgctatggcttggcatgctgatatgctagaacaaccaggaaaatttccataatcattttcattcatgcaatcattcattcatttattcctacccttgttgaaccaataaacatttgttgaaccacctactgatgaacatctctctttacatccaatgtctgaaaggctagatggtttttcagactctgggatttcaggagtcgcaaatgaggcaaaatgttgtgggcactcagcagtgctgcctcttttttttttttcttatgagaaaatgcaagagcaaagtagtgcaatatgaatgcatagaggcctactgcaacatggcagccatggctattctgataaatcacatctgtttatataaggccctatttggctatatcaaagaggtggaggccaacttctaagataagggagaaagagtatgttattttcccccaaatattttagtctttatgctcagtgaccaacagtctgacactctgtgtgatttcctactttgttctgtattccttgctaagacattggcctcattttaaagagaggcaaaagatactgggtctgccccatatcctgatagatcccccgatgtggtcaaatgtgtgtctctacctagagtagaagaatccctgacttcaaccaataagtatcgtggacactttatgtacacagccagaaatgtggcaggtcagctgccagtgctgttcttatgtgggtcttggcagctgctttgagaaggggacttagcagtgtgtagtgaaaatgtctctatggcatttgagaaagaagctaagctatttatatttaacaattataagagcaaccttatgctgaattctgttcaattcagcataccttgcctgagggcccactatgagttagctactgtactaggtgttggtaattcagggatgaatcagatgtggccctagctcacaagcagctctcactctggttataaggagcattcatatggaatacttctgtaagcaggtattaaacagaatagcagaatcagtgatgtggcttgttttaacacaattgagctatttcaagtcactacctcctgaaacctccagtaaaatcgctagtatggcagcctccactgcaactgagttctgtcataatgctagtattagaaagaattccagtatcttcaaatgtaggttctctcagttgtttaactcaagggttgtagttaagccatgtatccatcagctgtatttttagcaatgaggttaatttttttccccaaagttccgttattaaggatcctagagcttttctttagctttatgaagtgacaaagctgcatagcaatgctgttgagggtatatgatgaaactaccattgagcactgaacagtgaaacagcaggataacacctcaaggaaaggtcaagtataggatttttgtatttcaaaaagttgtgtcccccctaagcacagtcattggctgtctgtaaatcaatgaaatatatctggagtttctggccaagtagcaaataccatttcacatttccaatggagaaatttccacatatcctgtgtgaagttttctcatgtaagtcaccacaatcaaaaaggaggcttaacttcgctgaagcttgacaaaggaagactataatttaatgggaatgcacccagcaacatggccgtgcttagcatgggatgtcagcacaaacaggaagaaatattccattatgtagagaactctttcaaagagtggtagacagggaagggaagaatgtcaactgtctgagccaaagtcccagagaaagcattttggaaattttggagaatatagttaatcattataataatgatgattactattatgattcttacagtgtcatatacaaccatgggttcacagggcaatagccctgttagctggattagacaaaaataaagtttaatcctaatgtcgtggctgttgagatgggcctttatccattggcctctttgacatactgctaattgagctggtgtcaaagctctctagatgactgcaaaggaatgtggaaatttcattctgttttagctcattatctcctgtttaccccaccccactgccggttgctagctatatcaatttttttattgctttagttactctttccatgctttctcctgctttctgtactttcatttcctttataaagtagttttaacacctaatctattaactcctaatatttctgcttcatagaaatacttttatctccgatggttggatacaagtgtttgagcacaccaaaacgtgcttacagttgcagtcttgaatagataggtttgtgcattaaacacgggggtggggaacttggtatcatgctgatcttgtcgcagggtttttgcccataaaatagaagatagaaacaattaaaatctttttctcagaatctaaatattctctagctttatcaattggtaatttgcattctatcaatatgtctatcaactttcttcattccaccaactttcttcatttaaggtaaaaacaagaaaaaatgtagttgtcaaaacatgaataaattatttacctttgaaagtttaattgtttattagaatcttctggaaacaaatgttactttagctggtttctttttctaagcccattttaggtcactaagtagacaatatgggtaatctttattagcagagttgttcaagtcatccacattgttgaccactcatcttctgttttgcttgggcaatgccaaaactgagtctgtaaattaccttataatttcaggcacagaatcagaaggaaaaaaataaccttaggtttgccagttaaactttatccattttcacttttctgggtgttttaaggggaaaaaaaataataccttacccaggtaaaatttagcctatctttctaaagaggactctgtaggaaaaacagggaaaccaatcaaattaggttgtaagaaaggaagttaagcattggtcagaggcaaatgggactgaaatgtggtatcaccaaatgttttcccattgttatttttgattaagtttttatcctgcaactgcttaagagcagtcagtcccttcatagtgtatctgtacagttgcataggggagataattacttcaagatagattggtgattggcaatggaccctggacataactctttgaccaatggattttgaacaaatgtaggatagtgaattaatgattagagataagtcttattttaacgagaagcatattttaaagctattttatttaaaatagtcaattttcccattaacaaaataatttcaaattgatatgtagagaaatagtagttggcacgtaataatagactattcctatctctgactctgcttttacttcagaaaataatgtcttcaaaactaacatatcatttcggcttcgaattctcaagttttctttttaaatgtcttacatttgagagattatttactttttttttttttttggtttctgcatttctcttttttctactgcaattttccaccttttgtgcaattgtgaacaaggtaacgaaacgcctcccttcctcaggaacatctgctatcttcatgctttctcaaacttccagcaatcacagtttctcttggagtgaataaggtgatttcctttcttaatgtaccaacttgcttgcattctcatttgcctgacaccattttctaattctttatgaaaaattacttctcatgactcattttatatcttctattgatgcttagagtattttgtcattttcttttaatcatgtgttcaccttccaaattgtcacactggagaggaagtaatttttaaaagcttggactacgggtctgtagtcttcattgatccacggtatgcagtggccatggcgtgttagagctagtctgttcaccaggacaggaatgttttgcacaaatttctctttgtttgataatacggcaccggcacaactctcagaggtgttcaccaaaaggatggtaaggtttactaatcaaaccatattgactcatcttaccatattacttaccagtgccattccaaaaacccaagtttactacatactactgttgtctgtttacttctaccacaaaaacaattcgagttggagactttcttaggcctttgaatgtattcatttgaatgttatacatttactatatagtgtaatcatttgtacttttggccagaggagtagtctataggaaatgatttttttcttttacctttttttaaatatataatcaccaggtaggttaaccaattttcaaatgctttaagtatctttgcctcactattacagagaaatctgagctgtagaagggcatctgactcattatccgccagaccttcagtcagacctcttcttttacgaacattctcagacgaatctaatgtattgtaacaggtacctagtgttaaacaaatgggctggctttaaaaaatcggattaacagcattataaagaaaaaatgaaaatatcactctctaaattttctctgctgttggtgtggtgaactttacaatattctttgcaaaaatataaagatgcattacttggaatatggggaaatatgcatttaaaatattaaacattaaaatatgataagccccccaaataaaatgttaaacatttttcagagccaaatgttgatacagcatatttaatttgtaaggggcaagttgtcatggcaaggccaccatgtgaaartgtttgttaatattgatcaggaaatataactttgatttataaagatcatttggaaaactaaaagtaaatattccaaaattgcatctgtataatatcaagccaatttagcattgcatgttctcttgggaattatgtgaaaataactaaatgtgtttgtaccttcatgtgctgtgtctgtgtgtttgcaggtactgtatacacttatgtccttgtaaatgtctgatctccaaatatatatcaatgaaccagtctaatcataacttttttaatgtcaagttttattcaagctaaatgtttcaactttcagaggtaaaatatttcatagccattcagggggatgcttgcctaatgatataaaatgctttataattaatgtttccaaaaatgattaaattcactttataatgtttcatttacccccaaaaatatttgggaggaattgatacgccgtgggagggccccttgaactcagaatgactcctttatgtatagtctgtatttccttcagtgggggcctttaacaactcagacctctggaggtcttttatccatccataggaatttagagtaattaatgaacaaggcttccaagcttgtcagcttggaaacaactctacacagcttaaagcagggccatctttcatgcacacataaaaattaatgatcatcatgaatacaattgtgggttagttcactttgaagctaataattgcgagtccaccttataggcccatttttttcaacagctgtcaactctgccaccctctagcaaagaatayaagttaaattaatggattgactccattggttcttctgtcttcctggagttcatcgcagtctacatctgcactgttattttagaagcagactcattttgccacagttagcatctttttacccatttttgaacaacttacctgmgtatgttttcccttagtaatgaatctgcttcacaagtaaccttcaaggtctttgacccctttgtcccagattgcctcgttytaagctgtgtgatgcattttagctatattgtttctggctaattttgtatccccctggattgctctctttagcttggtctgtggtttgggggactgggctggatagaagacactgctgttgcttttggcctctccagggccttatctcctacaatgtctaacatagaactgaggaagtattttttaaaaacaattgtcttatttttaatgtagttatttcttccaggaatagattttcatgtggcattatttctcctccaaagacaataattagcagctagtttaggcatctagtttgttccttggttggtaaggaaactacctaactcctcaatgtgagttacattctcagtatgaatggcaaccttattttggttagagtcaccatgaccctgcagagctacctgaaaacctactagtggttctggagaatgtggaacataaatagaaatggaaggtattctaatgagcttctagtccagccatggcaaaggaggtgtcccagaatgggaagaaaatagcatactacttaagaccttccactactcaggttcaaaaagattgagttttagagtggagaatcaggctccctgttttgacatatgacttccatttcttaacatacttgacttacacttaatgatcagtttgtctgtcatgcaccatcctgatcatagcatttgatgatgtttagaggacagagaagaatctacagatttgatagggaaatatccgtggtttctcttccaaaaagatgaagcataagaaaaaacagaagaatcaatcgactcatagatacatgatctaccaaaaggaaaattaacttccatattgtaggggggaratatgcttctttcagtaaaaaggaagaatattttcacaataatcttccaaagctgaatatatcttcagacttcctctgtcaaaattaacacatcaagaaaaacagcaatctaatcattcatcaaacatttcctgagtatctgctgtgtgccagacactattactagctgctggagatagaaggtaaataaaatgttcctgttttcaaggacctcccagcctagaggagaagggatcacagcaagctaaacctctgctatggtaaataatcccagaggtagaaagtattaggagaaccctggaacaatccaaaagcaaaaagcaagcctgaatctattcagctgacaaatgaagaaaggattaaaatctggttatagtgtcactctttttttcccctgcatgtgaataaaacttggcactttgttaagacagttgctttactctcataacaaaatttactacttatttctgaaaatgcttaacagatggtttcacattattaaaataagccttttaaatctgtatattttacatttttcagaatccgaatcttgaactgcctatgttattgtcctacaagcatactgacagtggttacagctaaaaaagaaagcatgaagaaacaactacaaaaagttatcatctcaggatacttgataygcaacacactaaaccactctcatgtctagagttcacaataaatgttcattaaaataccaaatgattctcttaagcatttaccattattgtaagtagcctttatggccaaagctgtaagttaagaattatatgaaagttgaaagcaagaatacttagaattctggctttagttagagtaatataactcaaatgggtgctcttttaacccatgaactttgtgaatggatttaaatacaatagtatgaagtagaagttatgcaatgagaatgaatagattttgctaatactactttttttgcctggcagaagaaatagactatttggatcacatttctcattcctcctaaatgatcatcttaattttttttcccaagtacataaggaatacttgaaaatacagaataactaaatagtatcaatgcatcagacagaatagttaatcccttctgtttacccatgtgctactaatgtcttggtagaatattcttgccaaaaaaataccttgaacgcttatgtggaaagtgttaacttacgggtatttttgtgggaatagaaaaaaattgtttattttttattcttctgaattaaaccccacttatgggtgtaagcctactagacttgaaaataaagtataaaacatttccaatcacttagtagcccctcaaagtagttagaaaataaacagatttttccagtgttgattttactgggatctgcagtaaggtggtttaaaccatagttatataaaaataaaggtcattctgaatatcagccttttataattttatgtgaagaggaagaaatatagcttattttaaacttttgacggtttttatttgaaagagattgcatttatgcatatatgcagtgctttttcttaaacttggccaatttggaaagggggaaggagccaccccaaaacggtggttcagcttgtagagccatgactctgtgaagatgaatgttgtctcttaacttggacagggaaatggtctaactctaaaccatgtaactgaccttagtaaagtccttgactaactgaactagaaggaaggtttagccttctaattagttcacttgaaacataaatgtgaaatgtcttcattcaatgttaaacacatacttttttggatataaatgaccatatttatttgactgctagtttttttgttttttttttgtctttctggcatgcctgtactattattaatgtttatattgtaccttgatttggaaaagtattggagttaatctgtattatatttatatagtccatatggcacatttgattcttccacatatattttgtgttaatgtttaggtatgatttttttctaaattctagaaaagaacataatttcagttatcagaagccattccatcattatagaccctttttcattatttcatttgctctcatatatcagtattatttttgagcattttgttacatgtcattcacaacttacctaagtgtgctgtgttctggtagcccgtatttgaggtaagctgctgaaaacaaaagtctctatattctttgcctattccaaagagctaaaaaagtctaacccaggaaagcttttgatattttgtgtttgttttcttgttcttatggttgttgttgctgtattatgattgctgttttacataaaatctatgggaactgtgaatacagacaagagagccacagtagagaggcttgtttaatgcagtaccattggagagttaacagaataatctagtagaaaaataactggttgcatgtaaaattccttccagccagaaagaaagaaagacaaggagtaagggggatttagagttatgtctcagctacacattacattgtgatactgcagctcaaattcagaatggcaatgatacatgatatcatggcctagatccttgagagggacctggctttcctttttaaaagatattttactgaagagctaaaaactggccagtgtggggttagcagatcgaataacttgaaatagaccrtgcagtattcctagcactcaatgtaatcaccctatttgtgacagagaaagggaaaaaaatataataagatcatctacctataatttgaataattttgagctatcaaaatgtctttgtaattttcacaaccgctgtccattgtttgaggatgttacctactaaactgaaaacattcattccatatctacttacacatacaccagcaacagtataaatgtaagcctaactttgcaaaattcgtaataatttagtgatggaattttttaataacatgcagtatataaatgtgcagattttatgcgtgttgacaaaatcatttttcagcttgcaaaatgggactgcaatattacatttttcacttaagcagttttttacatctacgttgttgctttctaaaatgaatgtgaatgccatcttttatgactgcaacttgccttttccattacagaaatttttgtttgatgtaatcaataaactttggtatgatatgattgatatatcagcctcttttttttgggaaaggtctcagtttgacattaaaataatatggaagcaatttgttgatgggaactaagtttctaatttcttcttgacctgcacaattgacagaagtttgaccatttctacatgagttcaactggtattttatggcaatacctaatttggggagggtaagatatttgtaggagtttttaataacactgtaccttgttactgcatagataaaagtccagccaaatcagcaaatacatattgaaagtctactttgtgcttggcagtgtgcttgatgccagccatgcattgaaggtagcatatgtttggtctttgtggtctgtgtcttcaacccattgaactcatttgattcttaagcagtcaaacatgaagggattttacagtagcttgaaacttggtccaaaggtgtgtgtgtgtgtgcacaccacttcccccacctcttcttacattgctcagcctgcacccaagaccttgtgaaagtcccttttcttgaaaaacctcactgtccttgactgccaagaaaccagagttgctctacggaaactggtttcattgcatttctacatttcagtctctatgttttggtagtcttttaatcctgttggtctttgatctatatttagtgtgtattttcttctttttcattaagtggaaaatatgcgaaaacctgaattaaagtatcagctttgccacatttctctctgaatcctttttctttctcacctgtaagatggtgtgtggcagggcaaataaggtaaagaatgaaaattgctttgtaaaatgtcatttgctattcatatgtaggcattgttacttttatgttaagggttttttattgcttaattttttaatgaacagttgtcatttaccacattttcatagatgtcttacgttattttggcttattggaatcagtcagttcaagcttccttcccttcccccatccagccttatggggcgctccctcttcgcctcactgcttagtctgcccacagttggccaatacagtgagtattgtgagggtccgagtgatctggccccttcaacaagaagcacaggcagaggttaagggctgaggttatcactatggttattcagtgaatgtgtccatgggcaaagtgctggatgcatactaatgaagtctgaaggcctgtgttctgagaatagttatcaggggaaaaaagtgggcttaattattttgcaacttttaaaaaattaatttgacacaattttaccaacaactgatgggcgaggaaacatgggctcagttcctattgcgtagacctattgtgctaaagaaatgttgcagcgtggatcaagcaagtcctcatctcatgggctttgggagtaagtgctgaggcctgtggctgagagaaacagtgcactcatggtgggccagaattcctgctggcagtgagtctttggccttggctctttgggcaggattgagcaaaaaggatgtacataactaaaatacctgctgctactttggtctcttcagcagttgccaaaacccaattcctcacattagctaacacttacacagcacttaatatgtgccaggaactgttctaaccactttacacgtattcattcctttagtaattccagtaaccctaggagataggtactgatgtttcttcatctgacagatgaggatactgagtcccaaaaatactcaaggttacactgtctggtggagccagagtttgaatccaggtattccgattagagtctgtgaacttaactaggacactgtgtttctatttttatatcacccctgatggcatgaataaacaaatcatcaaaatgttagtattaaacttgagaaaacagacaaaccaaaattgaaggatattctgcacaataactggcttcaaaattacaaagatcatgaaagagcaagactgagtaactctcccagataaacaaaacaactaaaactttattgtgaaaactaaccgtggcatatgatcttggaccagaaattgaacattagtgggataattagtgaagtttgactacagtatctaggctatataacattgtataggcaatatatctatgttttctgataatttgaaattatgctgtgattatgatatattttggggaatccaagtggggggtgtatgaaaattctttgcactatttttacaactttgaaatggtttcacaattttaagaaagctaaaacaatgaagcttaaaaatattaatgggaaaacattaaattaagctgatacagaagactaattatctaacatctgcatagcactttatggactgcttttgtatgtaccttatttaattttcacaatagtcctatgtagagatcattaaactccagatatttaacatatcaactgaggctcagataagttaattatcttgctagtctcccaggactgaactcaggtatgacccatgtgtttcctgctatactacactttgcagtttgtctgggactcttaaagcattccccgttggattctagaatgatcaaaaggcaagtgttactgcagtcatttttgtgtgggtccatcagatgcagtcagatacaaccatagataaaaccattgataaagtcatgtcattgctcttagggttgaggtgagtggcctgagaatggcccaggcctaagttttcgttttccccctttcgtctaatctgaagctgctgaactgggcctcagcaccggtacttattcaggtattttccaaggcaagttttagcttactacccctgcttcccacccttggagtgagaatacaagaacacttctttaattttaataatgaaattaatacaaggaatagattacacagatagtatagctgaacagcccattggggattctgtgaaacggcccagagattacaaagaggcagaggccagaaccatccttaggttgtgggggcaataggaggaaatcgacttctggagccaatggcctggtcatttggcagaagtcggaatcactgtgggcctatcaggagcagctggggccacagcagagccatggccactattggagatgcagcctgaggcagaaataccctggcttctgtccccaagcctccagtctgccttccattagctagacccagctaacttgaggacctgagaaacaatacaaaacagagcaaagaagtacaaggaatgtatctgagggtaaataggccagggactagcacatcaaggatttaaggagtcaggttcggatttatactcttaagagtgtgtataaacataaaggtgaaactttaaggggctagatttcatcccctttataaatgtcaattatatatcccatatgaagaaaattgcggaaaaacaagtcactcctgtaacatatttagtgcaatactgatgataatttttaatggatgcttgaattaatggaaatagagggtccttgtataatcagccttcttaattagtaataaagacacttagcattaaaaaagacctaaataaaggagttagcatatcatttcatagataaatgaaattcacatacatcatattcaaaattcaagaataattcaccaggctctggaaaaaaagctgcaatattaattgcaaaggaaatgactttccttcttttcatccttctgcttccactcatgaaatagaaactgtcttcctgcaggaagcatgtggaagaaggtttctgccctcccctcctcaattagctgactggtgagactggagaagggggttactccacatgtgtggtttagccccacttgggcccttcctctttcagaactgccagcttgcaggctgatcaccttcctttctccattcccaaatccttcatgcagtatgctcagtgcgggcaaggaatccgataggcagggtggaggaggtggctctagttttctagccactcagtctgtgattaaatggataaattcaattcagagaggaaggaatgggaagtcattttggcctcagactaggccaagttttaaaatgcatctttgcaaataatagattgctattttgtctgcttcaggcgctgctgtattcttagtgcctagagcaatgctgggggagcataatgtttaaaaatatttgtcgaatacacaaacgcattatatctctgatgtctggcttatttcttgactggctttgaactgagaggggagagggatatgacaattaatatatggggcattttcacccttatgttctccataaacatggccagcctcatgctcattactttagaagtattaatatatggcaccaggaaagcataagattgcctgcagagcttcttggcttttctgttccacaggcagatcattaagaatgtaggttttcagaggagagggaaaaatgggtgtcatgggcatagagtgtcttggaactacatgattacagaagcctttcctcaaattggaagaacagaatgccccaggctgcagggaggagaaatgagaaaggatcttttagtgcaaagatcaggtcagaccactgttctgctgagcagcaccttcagggaaacaagaacagagaggacaatagaggggtgcttcaaggcaaatggcatcctagccagcattggcagaaaccattcctcaacatggcaagaacacagaacagcttctggccctggaacacatgatgcagatagggataatggacctcctgagtggtaatgtgtgtggatgatgattgaagataagacaggtgtcctccatctccaacaccttgacactgcattagctccaagaaccatagaacaaccctagtgaaagggggacctcaggccagataattttcattcatacattcagtcacccattcatttatttagatacctctccagaatgggagctaggcagggtccaaactgagtttaattttttaaacgtatttattgagtgccttctcccacatttactacattccttaacagctgcctttaatattatttttaaagcattatctctttcattctgctctgtcaatttctacatcgttgcatttgctagacaactgcaattattctttggggcattaaatttttttcttcaggtcatcgtgggtggaagtctttttataatatgttgcactcatctctgccttcatatgcagaaggcacagaataccacctcaccttctcaataacgctgagtcatcattatggatatccactaaaggactcggcaataagtacagtagtgccagcctttctgggtcttcacactgcttagctttaggaggatatcgtatttctttctatagtcttcctgtcagctcccttgctctcattgtcaatatttaatttttgttacgcctattggtccatgtctaccttcttcctcttgacttcccccacagatttttttttttctttttgagccagagtctcgctctgtagcccaggctggagtgcagtggcgccatctcagctcactgcaagctccacctcccgggttcacaccattctcctgcctcagcctcccgagtagctgggactataggcgcctgtcaccacgcccggctgatttatttgtatttttttttttttaaagcgggggggggggggttgttgctttgagggaagttacgcttattttttttttgtcttttgtttttttttttcctttttctggagaacggggtctcgctatattgcccaggcaggtctcgaactcctgggctcaagctatcctcccgcctcttagcctccctgagagctgggattacaggcgtgagccactgcacccggcccacagattttttttaaattatagcatgtaactgactaaaaatccagagtagtatatcagaacctagtgtatacttttggactgtactgcactctcagggtactgctctcttcttcccaccccagagtccccggaaccatgtaaaaacctctgcagctggctgcgtagtcactggttcaagatattcctctagacctctctgacctgcttcctgtgttgagcctctc

SEQ ID NO: 93512 - DNA, 21794 bp, Homo sapiens
tcatctatttaaagaaaaaacaaggagatatataacacagaagagatactctacagaccttaggcttcctttaaagactgcataacttccaaaagtcaagggaattgtttggctttttaaaatgtgagcctgagataagggaatgttcactaagcagtataataccaagttttgctttgtaatttcagacttgctgattctatctgctactcattgcctgaatttatatctcttttctactggaagtgggggactttctagttacagtaaaaatttgctacagctatgaaaatttgctaaagctatacatttgactcccaaataacttatgccaaacactttataaacaaatcaccctttgatgtcagcatttgtttcaaataatgactaattctgatattttttataaattcttaatcttattttatttcatagcttacaaagttaagacccttagaaattgacaagaattaactgctcaccaagtactgcatagcaatagagcgtcgaagaggcccaggaggtcctattagaaaaacatcttgccccaaaagatccttctgcattatccatcttagatgctgaactacagattgagccagagagtctgaaactataaagaaaaaagagaaaatgaagtgcaaatttaagtattacttataatataaatctccaagtaatgtggacatatttatatatatatataacgtatataaaatatgtgtttatctgtgtatttataaacatatgtatataaatatatataaacatatgcatatgtttatctggacaaacatgtagacacctgctgaattttcacatagttttacaataaaaccattattgtcgatgctaaaacaagattaagtttataatatcacaaagaattacatattccttacttgaaagctttccataacatttgaataataacctataactgttcctaacgaaataaaagcgatcttcaaggatgatttgaggaactgatttgattaatcacaattttatagtccaatctttttgttctaaaagagagatatgatcaaatcatcccagatagttaatgattatcatagtcttaaaaaatctgagaaaagcatactacaacttaagttggtaatgggttgtaagatcatggttagaaaatttgatgtagacttaaaactacttctttagaattaactatttaagtctattcttctataccaaattcttttgtgaatagaagaccaccccatgcaacgcccttccaggtctactattaaatcaccccatcaatgtgctcatcttctaactcagcattttctaaaatgtttaaattaatacaattagtttggttttgctcatatgtaaatcacccagtgagtccattcctgggtataaaagaaaaactcataaccttgtacatcaagagacatgtataatactcagagcagaactgtccaaaataaaactggagacagaacaatgaataaatacacagaatgaaatattatacagcaacaaaaacagaataaaagacccccacttccaatgatatgcttaacccttaaaggtataatattgagtgaaaaaaaataagaataaatcatgtataataccattttaataaatctcagtaaactagcaaatgaattctttagaaatagatatatatgtgataaaacagtacttgaaaaagcaaaacagcaagggaattgtaagttgatgataactggatacctgggggtaaggagtggccatggaatcaaagagattcttatgtatagcttcaaggatattggtaatattctagtttttacattagatgtgggttacagtgtttattatgttgcattttatacagacagacacagacatctgtattacataatgtcttttgtatgtagcaaatattccacacgtgctaaactttgtttaatcaccccactgaggtcacggattagttcaaagatccaactaagaaagcctaggactaaatatctagtgcttctagtgcttctcctcctctgacagcacaatattgttaggatagtctctcctgtactcccctgccccaaagaaagcaaacatttaatctttggaaaagataattttctgattttcattattctgataggaagatcaaggacaaggttttgggtaaattgtttggtttatcatgtcactggagtcacactaaagcatattataatctccccaaaacaaatgcccatatgtctgagactcattacttcaagtagaactgtttggtttctctcttgtttttacaaatcctctaagacattcatccctagcaggataaaatccctaagacatgcatccctagcgggataaaagttggttcctggaagggggacttgaaaaaaatgtttagatgttacaatagtttgtggtcctcggccaggcatggtggctcacgcctgtaatcccagcactttgggaggccgaggcaggtggatcacctgaggtcagaagttcaagaccagcctggcccacatggcgaagcctgtagtcccagctactcaggaggctgaggctgaagaatcacttgaacaggggaggcagaggttgcagtgagctaagatcacgccactgcactccagcctgggcgacaaagtgagactccatctctaaaaggacacagtacataagcagatatataacatatctatggtattcaagtttcttggggttaggaaggaataataacagggagaaaatatccgcaggagagtaataaagaaaagtagattgaaaaatactgctctaagaacctatactttttagcaatctattaggtagtttcatgatgctagcatgcaactggcctgagtctagagagttaatcttatttataactatcacatgcccttttacctattttcttttctacttgaagcttaaatcaatctttataatatacagtctattctttcttgcttcaagacaagtcagcctccttgctgtttaaggatgaaacaaaataagagttaagacaccttaacttctttattagtaaaactacacaatgttctctatgctgtaaatctattacctcttcctactctgatatcaaacatataattaaaaacttaaaaacactttgggttttttctttacattttcataaatctcagcttaatttggccacaggcattctctatagtactctcacagttttgtgtcactttgtattcaactttggcaatgtgcctgaccttccattatctggacttgataatttaaaatccaaaatttgtaaagttctagaagttcaagccaagttggtttctttaacttcctcccaccttttattatttatgactattggtaactgtttataattatggagtctcaatttagttctatacttccagtttgttttgaatgttttgaccttggaaccataatcattttcaagattttttaaaatctaaggtagcagttcctaatcaaatgtgaggcctgcccctcataaattgtctgtataataaagtgctgatgtttaggaataacttatcttttcattttttgaagcaaactggagcagaattgaggttatagccataatagagacatttgtacagcagtgtactttcttaagtagaagagaaaagcatggagttatttaaagctagagccctgggaattatgtataatcatgtttatgctcctgggagtgtcttccacttcagcatgatgcacatgtactgagaaacactgccttaaggcacatctgactagtctcagtccttcctttattcttagcactcagcagtggttctcaactggtgaccatactgctaccattctaggcctgccaggaggcatttggaaaatgtctgggagtactttgggttgttgtaaagctttgggaaatgagaaataatttggtacaccactgatattttgtgatggtaaatgcaatgaccaagatggtctcatcctgcccagtatgtcaatggcaccatagttgagaaatattgtgtagtcattattttttctcaaggcctctgttgcctgcacaccactaatgagtttgtcacaattaagcccagagaaagagtttctctctatttcctttaccttctgaaagataaaacttttagcgaggaaatcagtagagaataagttctacctttagagtaagtctgtaggagttgtcaggatatctaaggctctcatcatcacattccaattttacataagtttcttaatacatataagctacttctgaatcccatggctggccttgtagtctatggcataccttcacaaagaaaatacattttccctgcttttattctcccccaataacaatactaataatggctataatttattgcattcctatcaggtaccaggtaaacatacaaacgatttttcacataggatctcataacaattctagaaagcagcagacctattgtataaagacacagattcaagacagattggctgggttcaaattccaactctactatttactagctatgtaaccttaatcaagttatttaacctctctgctcagtttcctcatctgtataatagatacaattgtacttacttataaagttgttatgaggattatattaagcacttagaacagtgtctaataacagtaaatgctgtgtttgttaaatactcattactcccattttacaataagaaaatcaaaattggaaatgtagtatcatttgtctatagctgctaagtccataaaccaagatttatacctaagttgtttaagtccaaaacttgtatttcagtcattatgttctacagtccctccaaaagcttttcaacaggtgtccagcttcaggtgcaagactttccctacaagtgtggacctctcagggctacatcaaatttagcagacttgctgttccagccattagttctacttctttttggtggtatcaatggtatgttttattccttttattaaaatttcaaagttattttgtaatgaatattatgttatcagaggatctacttctcaaagaaaatccaactttcacttattcatgttttagtatagcgtattttaccaaaaagcatgtctatatttaatttgtcaggaaattgcactaaactactgaaagaaagcatcatgcagtgctatgtggtatctgtggtatattttacattaatgcttgaaactagctgtatttttagaatggcctcaagaaaacatgagtcatacttaaaagcacgccagaaatagaaacaagattcaagactgtacattacgaacatctgcaaaacaaagtgccaaactgccatgcataacctaatataaacatagcacagtacacgagagaaatccccaacttcaatgttttcaggcacaaaatgctaccttccaggagtccacataataataaaccgatgtcaaaataatcccaaagagcttgatcctatattctaagattccttttctatgtaaagataaaaacatgtagttcatactggcctaaatccctgattcaattcctaaccaatatttgttttcaaaaaatatgtactattttttgcccagccatattcaaaggctttaaagtaattttatcatagttatctaaattataattttctcccttcatgaactcaaattttcatacatataaaagttaaaattaaaattctagaaaattaagcataggtcagattctattataataaatccttcaaaactgttgatgttttcttagtatcccaaaaagcagcataatataatggaggaaaaaaaaaagtctttgaagccagacagacctactgtgatttttcatcctgtcttttatccatgtccttagacaagcattttgactctttcaggtctgtttccttattttcttttttaaattttttaaattatactttaagttctgagatacatgtgcagaacacgcagatttgtagtttccttattttcaaaataaagataataatacttattgagtatggtttgtgaggattataggtaaagcaccatgcccagtccctcagccaatgagaaccaggtacgggagaattattcaagtctcatcctcacctgcaaactcctatctctgctgtgtaccctggacaccaggctgtatagtgtggatttggtggatatgaataggctcctgagtttacactcaaattacctgctgggcctagaggcaaatctgaagaataagggagaaaggaacccagtacttactacatcctcactggtaaagcctatgttagagtactttcacttgacatttcattaccatttcatcaccccacaaaatagstcagaaagaatctacatctaggcccataacatgcccctgaatttgatttttctaccacatcacaacacaagatttcaaaggaagcatgactaacctcctcactgcaactacgtgctcatctgcyaaactttcccctatttaccatgtaacattctgtagttagatataatggacatgaagggtgaaaatatttagcaccaaagtcctcattatttacaacacgaactaaccgaactaaaaaattaatttattcacacagctatatttattaaggacctactatatgctcagcaccaagaatacaaagatgaataaaataaggttctttgaagacatcaaaagaaaaatacatatataaaacatcagcttacgtagcttatataaagccaatcatttataaagtgggctgatgtttctatgatccaatatagctgttatcaaaactaaatctacagcactggccagcacagtgctcagcacagagaagatattcagcttttcttaaaattggaaaaattcatcaatatgtatgaaataattatacatatccatattcaatgactaagtgtcatgttgttcactttttgtgtaagggtacaaaaataagagtatacatgtatatttgcttgtgtttgtatagaaaaatgcaagacagattcccctgaaactaatactgtgagaattaacatgaatgaaaataggggtgaayatataatttctcaatgtatatctttttatattgttttgatttctgaatgacaaaaatatattagttctgcaaaaaagttatttttttaaagtcatgctttagaaaatattttacataaggaaatgtccacaatatgttgctttatgaaaatggtctgtacatacaaaagtatggtctgcaaataaaaaaaggtaagaaaacattctgtatatacaaaatagtatatacagtacatactattattttcttaaatgatacacatatacatagtcattttttaaaacactagatacgtttcacaaagattcaagccatacaaagtgtgttctccgaccaaaattaaattaaattagaaattagtaataaaaagatctttggaaaatctccaaatatttagagactaaacagcataattctacatagcacatgggatcattgctaagtggtatcagtaagatggctgacttgaagttcctagcactcctcccccataaaaaaaccaagccaaacaaatgaaaaaacgacatttccaccaaaataaataaaggagagccctggagaactgcaaaggagtaggagaaatcctgtagagcacagaaacccaggatggccacatagagaaggaaaggaaactttgcctctgccaaggatgatctcagcccctatttggggatcagcttggacccaggaggtatttctctctgcaggaaaaaggtaagcagaaggacactaccagctcgcatcactactatggatacctgcagtctttgctaccagagattcctgcagtcctcacaggctctgagcccagctgagggagctccccagagtacacattctgtgctactcccagagaacaaaccgacactgtgccttaccccagtcccctgcctgagctgctactgtgttgtaaccagagccactgctccagtgcatcctgttccagggatgggtagtcattgcacccctccatcctggaggctttgccatcactgcagcacagctacctggtagcccccaatccctgaatttagctactgctatgctccaagttaccctgaagctgctccatcccctgcatcccagacattggtgtaccctgcccttcaaggcctgagctgaagtgatgctctcactggggacccacagcatcaaactacccccagacaccacacccatgcaacatcctatcctcctggatgccccaaccctccagcacaccagagaagatgtcctacccagtgccatagccgacactgtaccctgcctctcagggacctagcacctcctccaacccacgtagctgtatattttagggccaagctgatacggcatcttacttccagggaatcacagccttggatgagctgtgcctctgccctacaggtcaaatggccaaagggcctttcctccctagaacaggactaggaactcagaatctgagctgctgaggagccccacctcccgaggcagtagactgaggctgtactgctccctgtcccctgggccgtatctgtgccttgccatttctgggttcttgacagtgctgcacctggctgcacagaacctgggctattgctgagtgtcaccatcccagcatcaagagtaattagtgtgtgacatctcatctcccagggctcaagttgccactgtgccctgttgattctaggtcccaaattgcagctgtgccctattccctggggcctgaacctttgaggctccccttcttccctggagccatgccagttctgcacactgccctccatggtcagagccacagctatattcctgccccctgggtgtaagctgttagaaagtgcttcagaggcaagagcaaacacattcaaaagctagcagaagggaagaaataactaagatcagagcagaactgaagaagatagagacacaaaaaaaaccttcaaaaaaatcaatgaatccagaagctggttttttgaaaagatcaataaaattgatagaccgctagcaagactaataaagaagaaaagagagaagaatcaaatagatgaaataaaaaatgataaaggggatattaccaccgatcccacagaaatacaaactaccatgagagaatactataaacacttctgcacaaataaactagaaaatctagaagaaatggataaattcctcgacacatacaccctcccaagactaaaccaggaagaaggtgaatccctgaaaagaccaataacaagctctgaaattgaggcaataataggctaccaaccaaaaaaagtccaggaccagatggattcacagccaaattctaccagaagtacaaagaggagttgataccattccttctgaaactattccaaacaatagaaaaagagggaatcctccataactcattttttgaggccagcatcatcctgataccaaagcctggcagagaacacaagaaaaaaagagaattttagaccaatatccctgatgaacatcgatgcaaaaatcctcaataaaatactggcaaaccaaaaacagcagcacatcaaaaagcttatccgccatgatcaagttggtttcatccctgggatgcaaggctggttcaacatatgcaaatcaataaacgtaatccagcacataaacacaaccaaagacaaaaaaccacatgattatctcaatagatgcagaaaaggccttcaacaaaattcaacagcccttcatgctaaaaactctcaataaattaggtattgatgggatgtatctcaaaataataagagctttttatgacaaacccacagccaacatcatactgaatgggcaaaaactggaagcattccctttgaaaactggcacaagacagggatgccctctctcaccactcctattcaacacagtgttggaagttctggccagggcaatcaggcaggagaaagaaattaagggtattcgattaggaaaacaggaagtcaaattgtccctgtttgcagatgacatgactgtatatttagaaagccccattgtctcagcccaaaatttccttaagctgataagcaacttcagcaaagtctcaggatacaaaatcaatgtgcaaacatcacaagcattccgatacaccaataacagacagagaaccaaatcatgagtgaactcccattcacaattgcttcaaagagaataaaatacctaggaatccaacttacaagggatgtgaaggacctcttcaaggagaactacaaaccactcctcaactaaataaaagaggacacaaacaaatggaagaacattccatgctcatggataggaagaatcagtatcgtgaaaatggccacactgcccaaggtaatttatagactcaatgtcatctccatcaagctaccaatgactttcttcacagaattggaaaagactactttaaagttcatacggaaccaaaaaagagcctgcattgccaagtcaatcctaagccaatagaacaaagctggaggcatcacactacctgacttcaaactatactacaaggctacaggaaccaaaacagcatggtatggtaccaaaacagagatatagatcaatggaacagaacagagccctcagaaataataccacacatctacaaccatctgatctttgacaaacctgacaaaaacaagaaatggggaaacgattccctatttaataaatggtgctaggaaaactggctagccacaggtagaaagctgaaactggatcccatccttacaccctatacaaaaattaattcaagatggattaaaggcttaaatgttagacctaaaaccataaaaaccctagaagaaaacctaggcaataccattcaggacataggcatgggcaaggacttcatgtctaaaacaccaaaagcaatggcaacggaagccaaaattgacaaatgggatctaattaaactaaataccttctgcacagcaaaagaaactaccatcagagtgaacaggcaacctacagaatgggagaaaatttttacaatctacccatctgacaaagggctaatatccagaatttacaaagaacttaaacaaaattacaagaaaaaaacaaacaacccvatcaacaagtgggcaaaggatatgaacagacacttctcaaaagaagacatttatgcagccaaaagacacatgaaaaaatgctcatcatcactggccatcagagaaatgcaaagcaaaaccacaatgagataccatctcacaccagttagaatggcaatcattaaaaagttaggaaacaacaggttctagagaggatgtggagaaataggaatacttttacactgytagtgggattgtaaactagttcaaccattgtggaagacagtgtggtgattcctcaaggatctagaactagaaatatgatttgacccagccatcccattactgggtatatacccaaaggattacaaatcatgctgctataaagacacatgcacatgtatgtttactgcggcattattcacaatagcaaagacttggaaccaacccaaatgtccatcaatgatagactggattaagaaaatgtggtacatatacaccatggaatactatgcagccataaaaaaggatgagttcatgtcctttgtagggacatggatgaagctggaaaccatcattctgagcaaactaccacaaggacagaaaaacaaacaccgcatgttctcactcataggtgggaaattaacaatgagaacacttggacacagggtggggaacatcacacaccggggcttgccgtggggtggggggagcggggagggatagcatttggagatatatctaatgtaaatgatgagttaatgagtgcagcacaccaacatggcacatgtatacatatgtaactaacctgcacgttgtgcacatgtaccctagaacttaaagtataatttaaaaaaaaagtgcttcagagaaacagacctcagctttgtgggagaaatgtatccacttttgccttggaaagtgaaccaacacctcaagtcatagtgtttcagtaattttgtaagaccccgggcctaggaattctggacctgtgccccagatccccgtgctgctgcatctgcctgtgggctgtgtcagactagacatcaagagagataccctcatctaagactctccattgtgggaaagacaagaacaggaggatccctgaagctttggccactgaggatcctaataacctatgctgccaccatcactgacacaaactcctgcagcctagaccaccaagacacctgtagtcattgctgaaattgatcataactaaagaagctgtagctacacagagactacaccactgctccaacgtgcccaaccaatatcttcaggcccatctgcaggggaaagtcttcccctaaaaaagccactctgtaaagtttggaagaggtgactgctctatcaaatgcacagamatcagcatcagaacacaaacacacacacaaacacacacaaatgaaaaagcaaagaaacatgacaccaccaaaggaacataataattccccagtaactgaccccaaagaaatggatatttacaaatggcctaaaaaggaactcaaaaaaacagtcttaaggaaattcagcaagatataagagaatacagatagaaaattcaatgaaaacaggaaaacaatttataacctcagagattcaacaagcagatagatatcataaaaaagaaccaaatagaaatcttggaactggagaatgcagtcaatgaaataaaaaatacaagacagagcttcaaaaatagatgagatcaagcaaaaccaaaaatatctgaacttgaagatagctcttctgaaattacccagtcaaaagaaacagaaacagaaacaggagagaagagaggaggggaagggaggggaggggaggagaggagatgaaggaaggaaaagcggggggaagggaggaaggaagaaaggaaaagaaaaaagaaagaaaaagaaaacagagtgaaaaagagtgaagacagcccatgggacttatgggacactactaagtgaacaaatacattatgggatattcagatggagaggagacaaagacagggacagaaagcttatttaatgaaataaatgctgaggtccagaattcctaggcccggggtcttacaaaattactgaaacactatgacttgagstgttggttcactttccaaggcaaaagtggatacagttctcccacaaagctgaggtctgtttctctgaagcactttcttttttttttttttaattatactttaagttctagggtacatgtgcacaacgtgcaagtcagttacatatgtatacatgtgccatgttggtgtgctgcacccattaactcatcatttcccaagtattggaagatatatggacatcagattcatgaagcttaaaagtctccaaacagatttaatccaataagctattctccaatgtacattataattagtctgtcagtcaaagacagagagttttaaaagcagcaaaagaaaagcatcaagtcacatataagggaatccccattagactattagatttctctgtagaaaccatgcaggccaggagagaatggaataatatattcaaagtactgaaagaaaaaaactgccagtcaaamatactacacccagaaaaaactgcccttcagaaattaaggagaaataaagtatttcccagataagcaaagactgagagaattcatcaccactggacctgccttacaagaaatgcttcagggagttcttcaagtggaaataaaagaatggtcattaatattatgagtacatattgaagtataaaactcactggtaaatacataatcaaatccagaatactccgatactgtaaacagtgtgtaaatcatacatatctctagtacgaaggttaaaagtcaattcagtcaaaaataactaaagctaaaataagttgttaaggaacatataatataaaaagatgtaaatctgaggagtgcgtaaaagtctagagtttttgtatgtggcagaagttaagttgttatcagcttaaaatagtcaattataagatggacttttgggtggagccttctggaaaggtggcagtggtacagggggctgaggtgaaagtggatggcagcaagccaaaactgagcaagaatgagctgaagagatccctgaaagccaagaagaaagtggcagagaaggaggccaagcaggaagaactcagtgagaaagttaaaccaggccacagctgctgtcaccaaccataccactgacagtggtgtgggtactgaggagaagagcytggacccaaatcaacactacaagatccatagtcaggcagtttatcaastgaatgtcaatggggaacacccatacccacacaagttccatgcagacatctcattcaatgacttcatccaagaatatagtcaccagcagcctgggggtcacctgaatgatgtcaccttaaaggtggcaggtaggatccatgctaaaagagcttctgagggaaagttcatcttctatgaccttcaaggagagggggtcaagttgcaagtcatggtgaatcccagaaattataaatcagaagaatttattcatattagtaagaaactgcatcaaggagacataattggagttcaggggaaccctgggaaaaccaagaagggtgagctgagcatcattccttatgagatcacactgctgtctccccacatgcatatgttacctcatcttcactgtggcctcaaagaccaggaaacaaggtatcatcagaaatacttggacttgatactaaatgattttgtgaggcagaaatttatcatctgctctaagatcatcacatgtataagaagtttcttggatgaactgggattcctaaagattgaaactcccatggtgaacatcatcccgggggagctgtggccaagcttttcatcacttatgacaatgcgctggacatgagaattgctccggaactctatcataagatgctagtggttggtggcaccaagcagatttatgaaactggatgccagttccagaatgaagggattgatttgaggcacaatcctgagttcaccacctgcgagttctatatggcctatgcagactaccacaatctcttggaaatcacagagaagatggtttcagggatggtaaagcatattacaggcagttacaaggtcagctaccacccagatggcccatagggccaggcctatgatactgacttcaccccacccttccagagaatcagcatggtagaagaacttgagaaagccctggggggtaaagctgccagaaactaacctctttgaaactgatgaaacttgcaaacttcttaatgatatctgtgtggcaaaagctgttgaatgccctctaccttggaccacagccaggctccttgacaagcttgtaggggagttcctggaaatgatttgcatcaatcctacattaatctgtgatcatccacagataatgagcgctatggcaaatggcaccgctctaaagagaatctgtccaagcactttgagctgcttgtcatgaagaaagagataagcgatgcctaaactaagctgaataatcctgtgccgcagcagcgggtttttgaacaacaggccaaagccaaggccacaggtgatgatgaggccatttcacagatgaaaacttctgtactgccctggaatacgtacaggcatgggcattgaccaagtcaccatttttctcaaaagattccaacaacatcaaggaagtacttctatttcctgctataaaacccaaagacaaggagaatgtagcaaccactgatatgctggaaagcacaacagctggcacttctgtctagaaaataataattgcaagttgtataagtcaagcatctttgcacatctgcaaaagatcaaggtctgcaagggaattcttgtgtgttgctttccatttgactaccacagttccattcagccatcagaagagagacaaggaattaagaatttctttttattccttgttaccaaataaaccatttgtctcctctcaaaaaaaaaaaactataagatgttttatgtaagcctcatcatacctgcaaaacaaaaaagtatagcagatacaaaaacaatacagagaaagaaatcaaagcatagtgttatagaaaatcatcaaatcacagagggtaacaacagagaaagaaaggaacaaaggatctacaaaacagccagaaaacaaataacacaatggaaacagtgagtccttacctataaataattatcttgaatgtaaataaattatctaagagtggctgcatggatttaaaaaaaggggggaattcaattatatgctgcctacaagagacccactttagctttaaggacagacaggacaaatgtaaagggatggaagaagataagatattctatggaaatggtaaccaaaagaaagcatgaatggctatactaatatctaataaaatagacttcacgtcaaattctgtcacaagagacaaagaaggtcattatttaataataaaggagtaaattcttcaagggaacataacaattataaatatatattcacccaacactgtagcacctaaatacattaaagcaaatattaatggacatgaagagataaagagcaatacaataatcatagaggacttcaattctcaattttcaacaaaggatatatcaaccagacagaaaattgataaggaaatactgagtttgaattgcaccttagaccaaataagcctaacagacatatttgaaatttttcatccaacatcagcagtatacacatttatctctagcatacatgaaatggtctccaaaattgtccatgttaggccagaaaacaagccttaacaaatttagaaaaccaaaatcatatctagtatcatttcagatcataatgatatgaaactagaaaacagtaacaggaagaatcctggaaaatttacaaatatgtgaaaatgaaacaacatgctcttgaacaaccagtgggccaagaagaaaccaaaagggaaattttaaaatatcttgagacaaatgacaatggaaacacagcatgccaaaacctgtgggatgtagcaaaagcagttctaagagcaaagtttacagcaatagatgcctacattaaaaagattctgaacagttgaacgttatgcctcaagaactcgaaaaaaagaaataaacccaaagttagcagaagaaaggaaataaacatcataacagaaataaatcaaatagaaaacagaaaaaccatagacagaatcaacaaaactaagaggttttttgaaaaaataaaactgataaaccttcagcttgtttaaggaaaaaaaaaaagagaagactcaaataaataaaaagtgaaagtaaagacattacaacagatgcctcaggaataaaaaggaacataagggacacaaataaatggaaaatatcccatgtccattaatattgtgaagatgtatatactatccaaagcagtatacagattccatgcaatacctttcaaaatcccaatggcattcttcacagatagaaaaaacaatcctaaaatatatgtgtaaaaatacaaaagatctcaaatagccaacatttctgagaaagaaaaacaaacttggaaacatcacacttcttgactttaattttttttttttttttttttttgagatagggtctcactctgtcactcaggctggagtgcagtggcacaatcatagctcactgcagtctcaacctcccaggcttaagcaatcctcccacctcagtctcccaagtagctggggctacaggtgtgtgccaccacatccagctaattaatttttttatagagacagggcctcactatgttgccatggctgatcttgaactcctgggctagagcaatcctcctgccttggcctcccaaggtactgggattacaggcatgatccacagcactcagccctgtgttacaaattatgtgtgtatcaaaatatcacacttaccccagaaatatgtgcaactagtatgtatcagtttttaaaaaggtatgatactggcaaaaaaaagacagacacatagaccagtataacagcataaagagcctagaaataaattcaaacatatacagtcaaccaatttttgacaagggcatcaaggacccaatggggaaaggatagtctcttcaataaatggtgctgagaaaactggatttccacaggcaaaagaatgaaatcagacctttaacctataccatatacaaaaatcaactctaaatgtaagacctgaaatataaaattcctaggaaaaaagctcctggacattggccttggcaatgatttcttttttattatctcaaccaaaagctcaaactacaaaagcaaaaacaaataagtgagactacataaaactaaaaatcttttgcacagcatagaaaacaatcaacaaaatgaaaaggtaacttatcaattaggaaaaaaacatttgcaatccatatatctggtgaggggctaatatccaaatttataaagaattcatataattcaatagtagaaaaacaacccaatttaaaaatgggcaaaggatttgaattctccaaagaaggtgtaaaaatggccaacaggtatatgaaaaggtgctcaacatcattaaatcaggagtcagggaaatacaaatcaaaaccacaatgagataccacctcacatgtgttagcacggctattatcaaaaaatcaaaagataaatgtcggcaagggtgtggagaaaagagtgcgcactgttggtagacatgtaaattggtacagccataatggaaaacaatgtggccatttctaaagaaattaaaactagaaatactatatgactcagcaattcttctggatatatacccaaaggaaataaaatcacctcataaagatatctgtactccatgttcgttgaagcactattcacaatagcaaagatacggaaacaaccaaaatgtcaatggataaatgaataaagaaaccatgatacaggttgagcagctctaatcccaaaatcattaattcaaaatactctaaaatctgaaatgttctgagtgtcgacatgacaccacaggtgaaaaattccacacatttgactgcatgtgataggtcgcagtcaaaaagcaggcattcaacacccaatttactaagcatccccaagggaaaaacagaactaccttcaggctacgtgtataagatatacattaaacacaactggacttcatgtttagagttgggtcccatccccgcaatgtcgcaaatattcaaaaatttttaaaaatctgaaatgcaaaataactctggtcccaagcatttcagataagggatggtcagcttgtatatctacacaatatttaggccaggcacggtggctcacgcctgtaatcccagcactttgagaggccgaggcgggcggatcacgaggtcaagagattgagaccatcctggccaacatggtgaaaccccgtctctactaaaaatacaaaaattagatgggcatggtggcgcacgcctgtagtcccagctactcaggagactgaggcaggagaatcgcttgaacccgggagacgaaggttgcagtgagccgagattgcrccactgcactccagcctgggcaacagagtgagactccgtctcaggggaaaaaaaaaaaaaaaaaaagaatatttattattcagcctttaaaaagaaggaaatcttaccacttgccacaacatgaatgaagttggaggacattatgctaagagaaataaaccagacccagggttaaaaaaaaaaaaaaaaaaaaaaacccctacatgagctcacttatatgtggaatctggttggggcggtggggtgcagggggagtaaaaaatacagagatacagaaaaaaaacattggttaccaggggtaggggtgggtaggaaatggggagatacaggtcagagtatttaaatagcagatatgtaagatgaccaagtctagagatctaatgtacaatatgaggactataagtaataaaactgtactgtgaaattgtaytgaaattcctcctaaatgagtagtttttagctgcttttgccaaaccaaaaaaaacatgagtaactatgtgagatgatggatatgttaatttgcttcactatagtaaccattttactatctatatatatctcataacatcatgttatatgttacatataaaaaattaaaaaaaaaactaacacatgggcaaagaagaaattaaaagggaaattacaaagctttttgaactgaatgaaagtgaaaacaatgtatcaaaaattttagcattccactaaagctgtacttggggaaaattttacagcactaattgcctatcctgagaaaactgaagtgtttccaattaatggcttcagcttctgccttaaaagactagaaaaagaagagaaaatgagatccaaagaaagaaaataatattcatcatagcttaaaaatcaatgcaatagaaaacaaaaacacaaagaaaaatgaatgaaaccaaaagcttgttctctgagactaacaataaaattgacaaacctctggtcagactattaagagagagaagacacaattcaccaacatcatgaatgacagagagacagacagacagaaaatacagatacttcagatattaaaaggataataagtggatattgttaaaaaaaaaacacttatgctaatgtattccacaacttagaagaaatgaacaaagtccttaaaagagtcagctccttttttagttgacacaattagggataacttgaatgactatatctatgaaagaaactgaatttacagttaataacctcccgaaaagaaaaccctgggccaagatggcttcactgatgaattctaccaaacatttaagaaaaaatatcaattttatacaaattcattcagaaaattgaagaggaggaaattattcccaattcattctatgaggtcagtattaccctcatatcgaaatctgacaaagacatgacaagtaaggaaagctgcagatcaatatccttcatagagatgtacaaatcctaaacaaaatgttcacacactgagtccaataatatataaaaagactcacacattgttaccaagagggtcttatcccaggaatgagaagttgaaaagttagcttaacatctgaaaatcaatcaatgtaattcaccacattaataaacaaaaaagaaaaagaaaaaaaaacacaagatcatatcaaaagacacggaaaaagcacttgatgacatccaacatctcttccagattaaaaactctaagcaaactatgaatagaaaaaaacgtccttaacttgataaagaacatcctaaacctttacctaacctacttaaaaatgaaagactaaaaaccctttcccccaacatccggaataagacgttctctctcataacttctattcaacatattttaatgttttatataataaattacatattaaagagattttagcaagtacaataaggtaaacacataaaagaaatcagaaacatccagattggaaaggaaaaagtagagctgtctttatttatggacatgattgtttatatagaaaatgtgatgcaatctacaaaaacaagctctagaactaataagcgagttttgcacggcctcaagattcaagattagtatacaaaaatcaactgtacttctatgtttaagttaaaaagacaatatcatttacaataacatcaaaaagtatgaaatactcaaagcataaagctgacaaaacatatgcaagacctgtacactgaaaacaatacaacattgctgagagaaattaaagatctaaatagagaaatatatcttgttcatgagttgg

SEQ ID NO: 93513 - DNA, 68506 bp, Homo sapiens
aggggttacagggcccatgcaagtccaaaatccagagggggagtcaaattttaaagttccaaaacgatctcttttgactccaggtctcacatccaggccacgcagatgcaagaggtgggttcccatggtcttgggcagctctgaccctgtggcttttcagggtacaacctccctcctggctgctttcacagcagctggcrttgagtgtctccactcactgcagccttgaccgctgggcttaagcgatcctcctgcctcagcctcccaagcagatgtccacgacagagaaagggctgtaaacagctgtgagttcccacagcggcacactgcacagctgtgagagaggactgggggtccctgcacaacatgaggggtcccacagaggggagggcatgccacaggatggtatgcagagcatggtcctcttgatgtcggctcatggacatgtgctgttatacacgtctggtccagggacgttcaagagggtggtgtaattatagacagaagacgaaggctgacctgggacgcgagctgtgcgccatgatgttcctggtatcaagccgggagagactggagctacttgagccagggaggtcctcggggcaattggggggttccaggctgggcactaacgaagcccacccccgccccgtgttctcccagatgttcagcaatgggttgacaagtttttcaaatgtaagtaggatttcttggttatgaattaaaagcattttcattccttcgcagaagtcatggtcccagttaatagaaattcatttcatgtctcttctttttgctttcagaagaggcaaatgagcctggcagccctgtcaggaccatgctggcgtttgggcacatcctcctggaaatgcctgacggtgtctcagggccctggcacagagctgggcatttagacctttgcatgagcagcagcaaagtccccaaaacttccaggagtgggtgtggggcagccccaggccttcctgcctgcactcccagttttagcctgcgtcatggtgtctgcattcaccttattgcagccccaggtgtctgtgctggaagactgaaattctggttgtttaaacggctgagtggaaactgaggcacagagaggaaaaggacttcacacaagcgtccccaagctgcagtaacaaatgacaacaaactggggtgttcaaacaatcgggatttacacacccaccatgcacccacacaattaaacattaaaaacagaaacaatacaaattcacacatctaccatgtagattcccacacaattaaacactaaaactaaaaacagaaacaatcgggatttacatacccaccatgcacccacacaattaaacattaaaaacagaaacaatacaaattcacacatctaccatgtagattcccacacaattaaacactaaaactaaaaacagaaacaatcgggatttacacacccaccaagcgcccacaacaattaaacattaaaaataaaagcaggctgggcgcgttggctcacgcctccaatcccagcactttgggaggctgaggcaggcagatcacctgatgtgaggggttcgagaccagcctggccaacatggtgaaaccccgtctctactacaaatataaaaattattacgtggctgggtgtggtggtgcacgtctgtagtcccagctactcgggaggctgaggcaggaggatcacttatacccaggaggcagaggtcgcagtgagctgagattgcaccactgcactccagcctgggtgagggagcgagactctgtctcaaaaataataataataatttttaaaaacaaataggaatttacatgcctaccatatacccacaacagttaaacattaaaaacaaaaacagaaacaatagggattgattctttcacagctccagaggccagaagttccaaaccaaggcgtccgcagggtgggttccttcagaggctctccaggaggtccttccttgcctctctcctggcttctggtggccaccggccatccttggcttgtgctacatcactccaattgcttcccccttcacacctatctctgtatctctgaatctctctctcataaagacactaggcattggattaggacccattctaatccaggatgacctcattttaacttgattatatctgcaaggacgcctttttcaaataaagccagccaggtccagtggctcacgcctgtaatcctctcactttgggaggccagggcgggaggatcacttgagccctggagttcaagaccagcctgggcaacataatgaaaccccatctctacaaaaaatataaaaaattagccacgtatggtggtgcacatctgtggtcccagctactcaggaggctgaggtgggaggatcacttgagcccacgaggttgaggcagcagtgagctgtgattgcaccactgcactccagccagggtgacagagcgagaccctgctttaaaaaaaaataaaataataaatgaataaaaatcaagtcacagtcgcaggtaccaggggttagaacatgggcataatcattttggggggaccacagctcaacccacaacaggcttgtcttgggacccccccgggagttggcagcagagctgggagctcacctgagtgtattcgtctctaacgctgcgctaccctggcttgcaggccatgtgacatttctttccctaaaagtggtttgggtagggcctgagctgctggctgtgccagcaaagaaatcactctgctttagtcacctcaaagcagtgggcccagcgacaccctgctgcccatggacactgagggggactgtccatcctctggcatggaaagagcagcgttcttggagaacttggccttggcccttaggagactcaagggagagccctgcacggtggccactggtggccgaggaaagtccagctgcccggggaaggtgctgttcactcacctgctgcccatggcccagggccagaccaaggcatcagcccctcagccatccagaacaggccagtgaagcttccaggatgggtctgcacttgcggaatatttagtaggcagggttctgtgtgatgtccttaccctacgtgctcttgtgaaatcctcattatcagtttgctggggctgccaggcttgggggcttcaacaaggatttattgtctcacagttctggaggctggaagtctcaggtcagggcatcagcagggtgggctccttctggggctgtgagggagaatctgtcccaggctgtcccctgacttctggtgatttgctgacaatgtttggtgccctttggcttgtgaagcatcgccccagtttctgcctttatcttaacatggcaccctccctgcttgtcagtgtccaaatttcctccacttaaacattttaattaattggctgggcatggtggctcacgcstgtaatcccagcactttgggaggccgaggcgggcggatcatctgaggtcgggaattcgagaccagcctggccaacatggagaaacccgtctctactaaaaatacaaaattagccgggcatggtggcacatgcctgtaatcccacctattcgggaggctgaggcaggagaatctcttgaacctgggacactgaggttgcggtgagccaagatggcaccattgcattctagcctgggcaacaagagtgaaactccgtctcaaaaaatttttttaaattaatttatatatgtgtatttatttattcatttatttattttagagacagggtctcactctgcacccaggctggcatgcagtggcacaatcatagctcactgcaacctgaaactctggggctcaagccatcctccctcttcagcctcccagagagctgggattacaggtgtgagccaccatgcccagctgaaattttccctttttacaaggatatcagttatactggattaacgtcccccctaatgacctcatcttatgactttatcatctgcaaagaccctatttccaaataaggtcacattcacaggtcctggtggttataggatttccacatcttttgggagagacacaatgcaacccataacaacctgtaacccaatgtgctgtcccaaagaactacaacaccagggggatgctgaggttcagagagtgtccttgccctggtggtagggctgggacgcagcaggactggggaggcgggacccactgctgctagacactgcagcactcttagacacagctcggccacctgagcaggtgatcatttcccagttccgctctgcagaccctttttttttttcccagtagagatgaagtttcactatgttggccaggctggttttgcactcctgacctcaaatgacctggccgccttggtctcccaaagtgctgggattacaggcgtgagccacagtgcccggccccactttgcagatttaaaaacaagacatctggaagctcagagaagttaaactcaccccaggtcttacagccaaactctggcttgcctgacctgatgtcaggaggctttcttagtgcaagaaaggaagggcagggcaagccttagccgaatgtttatctctaagaggcttctgactctcctgggcgcctccggttccttctcccaggaaggcatgtggccgagctgggcttgggtgactcatggtcctagagtgatgagtgagaaacaggcactgtgagagtcatggtaggacctggccagaacttcgtcccctaagtcctggacttggtccctcctttgggattagttggggtctcacagagcctcccacatcctgggcaagttacagcacatgctacaggatctttgcagaaatgtaaacaaactctttcttcttttttttttccagccaccagtagaatttagaatttatttatttattattttatttatttatttatttatttatttgagacggagtctcactctgttgccagtctggagtgcaatggcgcaatctcggctcattgcaacctccacctccctggttcaagcgattctcctgcctcagcctcctgagtagctgggactacaggcaagcgccaccatgtccagctaatttttgcatttttagcagagacagggtttcaccatgttggccaggatggtctcgatctcttgccctcataatccgcccacctcggcctcccaaagtgctgggattacaggtgtgagccaccgtgcccggccttagaatttattatgaaattagacatgaggttccaaaaagtaactagaagattttttactttttattttttgagaaagggtctcactctgtcgcctaggctggaatgcagtggcacagtcgtagctcactgcagcttcaaactcctggactcaaatgatcctcctgccttgtcctttcaaggtgctgggattacaggcatgagccactaatcctggctaataatttttcttgacatattaaaattctgtttcttaaatagcatttcctctcattttggatgggtgcacgaaccttgggtgggatatccttgggaggtgacatcatgcacacagaaggcaggagccctaagggggttggggatggctccagaatggggtctgagaaggagatggagaagcctgttcacgcaacacttcatagtggcttgctttccgcagggtcattggcagggcggtccctaggcctggagcgctcttcccgcccatccccaggccctgctccaggtcggcctcctgggaaccatcccgtctcgccagcacacyctgtcccgaggccgcctctgacctccaggctgggcctggtccccacggcgcttagcgcaatcatgacttaaacacctattacaggacgctcagtctttagtgcttgtctccccgcggctgggctgactactcccagcacggccactgaacgcttggccgcgcgatgctccggagcgcgggtcgccattgggttgaactacagctcccagcatgctccgggccggcgacatccggagcccctggtagttgcctagcgaccgggcgtgtcccggaagacgggcccggcgtggggcgcgacttccggggcggcggttgcatcagattctaggaagtgtctgtagccgcagctgcgggtccgggattcccagccatggcagattcctccgggcagcagggtgagcggcgcggccgggccaggctgagggcggctgsgggcctgactgggcgctgggtgctcggctcgaagggcagcgagtccttatgtctgaggggcccgggtgcatgggttctgaggggcagctgtgtccgtggtctgaggggcggcagtgcccgargtctgaggggtgtcagtgcgcggggtctgagggacggcacgtccttgggtccgargggcgggggtgctcggggtctgaggggtgtcagtgcccggggtctgagggacggcgggtcctgaggttcgaggggtggcacgtcctasgatccgaaggacaacgggtgcccggctccgagggacggccactgggacccctgggactcctgcgtgagggtctgccagacccgtggctggagcacagaccccgcggggacccgagcccgagcggggcgctgcccagaccacccagcytcagtttcctcacttggttcctgccgaggtccccttgcatcctcaccccgggaggtggccctacatcaaacagcctttccccagccggtgcctgggcgggccctcgctccctcttgccccagctggcctttagrggggagacaaaggcccaagggttgttttggttttctgcccagacctggcagcttccgggaggtgggcggagggcacctgaggttggtatttagggaaatggggcagaggacgccaggggtacgcgtacacacagtaaaagggcttggggctttacgaaggctttcatctccagttccgcaggcagtccactgcaagctgattgtcagagcattactgccccattttattgccaacccgggaggttccccagggacacagctgtgtcagctcccccagtcactcatgtcaccagcgggtagaccttgagagaccagtgggttcttctctcactgtccctccagcaagattttaggtgctggaaaggcaagagactgaatcagaaagcccagattcctaacagtctggagcagcctttccaaaggaaacattctcagtatctagtttttaattcttttggctggcaaaaattagatgcaagttcttgtaagacacctccagcccccaccctcagtttagatcgtaccaagatttccttagcatctggtggtgccctttgcccctgagggtttattgggttatagataggtagttatgacaacccgagtaatctggcggcatggggacacccagatgacagggctacactcttgtgccaagtggcaggaggtggtcaccttccaggcacgccgcctaccaccctacctgtgtgcctggattccagcaccatctccacccgtcccagagccaagcggccctcagaagtcacccagattcctgtaaaacagcatcatagttaacagccccaactctggaaccaccctggaagggccagggtyccaactctgcctcccgccccacagcaaaccatgcgtaatggctcctaccttggagcatggagtgtaaatgaattaatagatgggaaggacgtagaacagtgcctggcactcaattaagtgctgtgtcygtgctgaaagttagggcctgtttgttttcaaactaaaaatgtgtttttgttcatttgtgaacgtaaatgacgtattagtagtgttttgtatcttgtttttaaaaatagctttagaattttaggttttcagagccttgtaagaattgccttctttttggagcttgccatataggttgggattgccctctccgggctgtcagggcagcaggcagattgcccagtcctcagcctgcgcacagcatctccagccagtgttcttctgccccagggcatggcccacctgcctttactatcgcctcctcccatcacacacacactctcaaagatgagaacaggaaataaaatccaatcgtaggccaggcgcagtggctcacacctgtaatcccagcactttgggaggccgaggcaggcagatcacgaggtcaggagatcgagaccatggtgaaaccctgtctctactaaaaataaaaaaaaaattagccgggcgcggtggcgggcgcctgactactcggaggctgaggccggagaatgatgtgaacccaggaggcggagcttgcagtgagtcgagattgcgccactgcactccagcctgggcgacagagcgagactccgtctcaaaaaaaaaaaaatccaatcgtaaatgctttcagtgaccatcttcccagatttttcaaggaggccatcatttttgtaccatcttccctaagttgactcagaaggtctatttctctttcctgatytcactgggtgtacagcttttcctttgcagtcttgaaggtgcataggcttggtgcctgtccaagagcytgattatttcagaaggatgagtttcatttctgaggtttctggggtagatggagcctacctcagggcctttccgcacagacttgggataccacttggtcggctgctcatcaggtcagacttatagtttaatttttatacagtttaattcaagggtcttcataataacacagccagcattttttcagcatgagtctgtgccgggcactgctctaaatgctttkcatctgttatctcctgccacccttgggggaacccctttgaggaagatcctgccggcatcttgtacagatgagaatcctgaggttcagagaagtcaagcaatctgtccaccatcacgactagccagaggcacagccaggctcccaacctgggcagcctgactcaatagggaccttaactgctgtgctgtgctgcctttgatgattctcttcagactcacaatagctcaacccagtgagttaaggcagacgagaataaagctgatgcccttcgatgttttccccagagccacatgaaatgtttgctcctctatgaactcaggtaccatgtttccgggtatttgaagagccttaggcagtacccttggggtggagattaagccatttccagtgtgggtgctctgggtggcaatattgctgtctgatcaccccacaggctcattgtgagggatgttggatgcccctaataatgaataacctccctcccagtaaggaggaagatggagatgctgttcttgggggtgagagaggatgcctgggggccacctttgtgaacgagttgcagctggacctccggggctggtgatcaggacggggagtgggaggggaagccctcacctgtgggaggaggcgctggtctctgggagtgggtagtgttggctcctagttggtgagagcaggggtgcatgcccctctctcctccccacgattcatgtctgggggctttttccggtcccctttctgaacacttcttgggcagggagtggatcactgggaaggacccaagaggagcagctgtagagggtgggaccaggggaacatttgcagaaagggagtaacctgcagggtgagatgttgcctggacacccacaagatgaggaccctggtgggacctttgaagtagcagggtcagagggcaaagggtcagggtgagtgaggggtgcagacccccaccaaaccggggcacttattaggagctcagacctgctgtaaaggggtctgcattttagcaagctttccacccatggggaagctggtttaaacctcacttgctgggcccaccccagagattctgatttggcaggtctctggtgagcccaagaatgtgacttctctggatcccccaggttctgctgctgaaggcacaccagggccatgcctggagtggacctgggagagcctcaagggaacgcaggaagagaaacagggcagccgggagaggtttaaatgcttacaggaggccaggcatggtggctcacgtctgtaatcccagcactttgggaggccgaggtgggtggatcacctgaggtcaggagttctagaccagcctggccaatatgtagaaaccccgtctctactaaaaatacaaaaattagctgggcatggtggcgggcacctgtaatcccagctactcgggaggctgaggcaggagaatcgcttgaacccgggaggcagagtttgcagtgagccgagatcatgccactgcactccagcctgggtgacgagcgagactccgtctcaaaaaataaaataaaataaaataaaataaaaataaataaaaaataaatgctgataggaaagagccagagagagggagaggtcgcactgccacagttgtttgacgtgtcagggttgttgttcatttggtgtggctttgttttggtatctgtgctgagcaattgcttggtacttgcatgtgatttcaataaatgttctgtagagactccacctttgtagccggtgacaaccaccatccacctttgggacattcccatgtccctcaatgtgttgatgaactgaactgcaaggtcatccggtggtggacattccttctcatgggggcagagcaggagtttcggcacggagcgtgcaggctctacgatgagggccagtgtcgaggaacaggtccctgggaggttttcagtctgctcagaagtgttctcatctgatctcagcatcagactgatccacagcctggctcaaacccatgaccacttgaaagctgacctatttttatttgtttcctcgagacacacttaaatgcagctaccacgattacccaaatgactgtctgcgtccatctcatggaagcctgtcattctcctgtgcttccctgggcaccagcacctttctgctctgagaagatccttcccaagcatggwcttggttcccttttgatgagccgtctagcctgctctagacggtacatttaagaattatgtgatccaagatcaaggcagatttggtaataaacttttaaaataataaaattaattaaataaaaatgggtgtgtgagccctaggaaaactccaggaaattctctgtgtgtagcatgcggctattacaatracattaataataccagagcgattatgataataatgatggcaaatggggcccctggctctgtgccaggcagcttttaaacattttacaagtgtcatttgacttaatggcctgcagctttacagggctgatgttatgagcgtgttttaccgtgaggaaatgccgccgtgtgtgtgagtgtaggtactcagccctggagggcgtcggggccgcccctcaggtctccagagagcggatacacagcggcttcagttcccagactgcttcctcagcrctcaaaagccactgcagccgccgttaggacatttgatgtttttctcattttaaaaatagcagatgcttactgcagaaaatgtgagcaatgaagaaaaagagggaattaaaatcacctgtcaccccctctcatcaaccatcgtcactgtcagtgttcgggctgttgctggtggtctctccatcagaatccattctgagtgtgagaggcacgtgactgtcagctcgctgtctcagctggaagccgatgctgtgtcactgtttctcagggtgctgctgttgtctcttcttccctcttgctgtcgtggagtccaacccaggcatgagcagttgcagaagaccaaggctcagggaggggacaggggagaggaatgtggagggtcagcattggggaacagctttcgaactgtggcctgatctgtgaggggacaaggctcaccttccagctctgtccatccctctggcaagttctctaatctttagtgaacttcattttctttatcatgaaatgggacccctgctggcagctgcagagctgttggagggaaatatccagctaaactagaagtctcctggctggaagttgctctgcaaaagagtttgtaggagtctgatatttatttagagttagttttccaggacctcrctttggggtgcttggagctgcctctgtgggtctgcctccgcctccgtcctccctgatctcatctccagytgggaggagagcgcatctccatgtaagcagcctcctycttctcagagggaagccccggcagtgtcagtgctgacactgggcctgtaactgtrgggatggggcaggtgagaggccctcaagagctcccggcaccccccaggcgccttcagtggggccagagtccacccctgtctttctctttccttggactgttggaagagctgaagtgaaaagtgacttgttcttgtgtctctggtatctttgggcagcagggctcctgctaagcaagcccctgggggctcaaagcagcagaggctgtggccggttcccagcactggtcyttgtgcaggtgtctttctgagaagggtgcatgaggcccagtgccacaggggaacgccagcccaccactggtggcatgcactctgtggtgccattctgctgtccactcatctrtgccctaggcaactttagctgatatctggaatgtcacacgctcagttgtagatgctgaagatcgagcagtgaataaggtagatggagcggtggggcagatggtgaaggaaagaaatgcgggcacgtgttagacaggggtgctgcggagagaaagagcagccaggctcagggtctagaggcgggcgccatatggacagggagtccttgaagacctggtggggaagccggcacstagcagagctgtgaaggattaaggggcctgctggtatctggggagcatgccccctaaaaaaagagcagcaggtggaggggccatgtgactagggtattgtgagtcaggtgggggcccatggccagcatgaggacaggcttgtgctgctggcgaggtgggtgttgggggcagtaatgtgaacgtgcgcttttcagcagggccgctggaggcctgtggctgtgaggggagagccatgctggctacaggtggcggtgtctggcttgcaggaatccaggtgacaagggctggctctcaagtccaaagcttcttttgagttagaggccccggatcctcccgtgggttggctatgggtgctcctaaggataacttgtaaaggggtgtgattccagttttggctagggagtgtgcccagagctttgcttctgggtgcctgtggctgcttggagtgggtggccatcttattggggtcagatgggacagtggctccgtgcagtgggaaggaagcagggcaagttagagggacgctgcactcgtcatcccaccagcgagagtcatcccaggaagccattttaagccctgcatccatgttgagacttcaggaaggctytcccacagagtgcccacccctttactgcagagaagaggtggcttcaggacatcttctccggcagccacggaggctgggccttggggcatcacgtggctccgtaggctccctggcgggtgaagagctcggcccagtggggcattcttgctgctgcagctgtgcactccattctgactcatctttgctgacaccacagcgttccgggaagtgccagttattggcctgacacgaagggctttccccacactaagcaaagcagagaaaggcattcgtgtgcagttacccccgcaacacactctgctctctgttttcagaagctgtgtgggyttggttggggtgactctggctctgtgccaggagtaaacacggagatgggggacaaaagggaatgggagaaggcagagagggggactgtgatgtgcagggcatccacgccccatggctgtgatgtcgggcagcctgtgcccaggaagggcagctggcacagcaaggggtggccagacatgtgcattcctaccctgagtgaactctggggtgagagggtatctgtctggaaggagcaagcatcggtccttttcccacagtcctctcagcaaacacaatcactggttcaaggtttggatgcacctgtgctcatgggctcagggaccagactccctcctctggccagaagcctggcaccatctgcctggtctgcccccactttagggacgtgggctgtggacacagcacctggtccacaactcccgtgtcagaggtaattgcagggagatattccttagaatggtgagacagattttattccctaattcctgacagtaggggaaggagctgtgttccctgccagttcagcagaggtgacttttggatttaaagggagtatgaktagctgggcctggtggcatgtgcctgtagtcccagctactcaggaggcttaggctggagggtcacttgagcccagcattttgaggctgtgatgagccttgattgcaccactgcactccagcctgggcagtagagtcagacgctgtctctaaaaaataaaaataaataaataaataaataaataaaaataaaaaagggagaatggaggaggagaaggagggtgagcaggggctcaaatgaaaaaagccatggagctggtcagcgtgcatgtgtcaaggcggccttgtctacagctggcagtggtgaaagttagggttctgctcctcctcccaatggtgacatgcggaacagtggctcttgggtccttgagtgacacacctgagtggtggaggtgcacgcttactgctttgaaggctctaaggagggaggctggggcctggggccaggggccaggggccaggtgaggctggctggagcagccacattttcctggcagccctgtgctttcttgggctggtcctttgagggggcccagtcctcctgaggctgtggccttgacctgcagaagycatgctagagtccagctgtctcttggtgcaggggtgtaaatggcacacattgtcaatgtggggttctcctacccctcatcccccagcacccagagggagagggtgccgctgcggcaaagaggcttgaagttggtttggtttgggggatttctgttgtgagtttttaaaaattgaggttaaattctcgtaacatacttagctgacaggagggataccatgatcatgtaggtagctttcccaaggcgaggcttatccgttatactccagatgtgctgacccctatgatttccccaaatgtcagaaactgaactgtgtaatttgtgatggtgtggaactgtgttcctgctttccctgatagaaaacataaattaaaaatgtaaaaactaagtaatttatatgacataaagtgaaaagtacacaattctgtggtatttggcgcatgatgttgtcatgcagccttcatttctgtctagttccaaagcattttcatcacccaagagggaacccatccatacctgtcaggcagtcactccctcgcccccagtcgaagcgctgcccctgtgcctttgcctgttctggatgtttggcgtccagggaagggcttsaacacctttttccttggttctgtgccatcccctagtccctgtctttctggcggcctctgggctgcccgcctgcctgcctgacaccatgtgccctctgtctttgcagctcctgactacaggtccattctgagcattagtgacgaggcagccagggcacaagccctgaacgagcacctcagcacgcgtagctatgtccaggggtactcactgtcccaggcagacgtggacgcgttcaggcagctctcggccccgcccgctgacccccagctcttccacgtggctcggtggttcaggcacatagaagcgctcctgggtagcccctgtggcaaaggccagccctgcaggctccaagcaagtgagtaacagagtgggttccctggccattagaacctctctcccaaggtcaagggctttctccatcaccctggtgcttacctggcgtctgcggataccccagagggagcctcgcccaagtgtgtctcgagcaagtggcctggatgggcagatgcagcgcttgctggatggaggttgggataaaatcacgccctatggagttggttattcaggagcagtatgttcacatcactggtgtggcaggattgcctgaggtggtggggtgcagagccgctgcggctctggggttccacgtagcatgcccaggccacgggccctagccttgtgatttttagctaaggctgtgcctggctctggttgactcagttctttctctttatttcttccataagattgtagcgtgtctatcctccagctttagaattgttgaatcctaaagtattaattggcattgaacttttttttttttttttttttgagatggagtctcgctctatcgcccaggctggagtgcagtggtgcgatctccactcactgcaagctccacctcccgggttcatgccattctcctgcctcagcctcccgagtagctgggactgtaggcgcccaccaccatgcctggctaattttttgtatttttagtagagacggggtttcaccgtgttagccaggatggtctcgatctcccgacctcgtgatccacccgcctcggcctcccaaagtgctgggattacaagtgtgaaccaccgcgcccggccggcattgaactttttaaaaatcagaaataagtcattttttctctttgagatgatgtctgtcccgtagctccagcctgttggtgctggttgtgtctgtggaacgtgcctgtggttatttgcgggagatactcctgggatgcctgcatggctttgtcactctgtggcaaatctgagggggctccatgccatcatcactgaagtatgcctttgggtggcccarctcctcctgtggctgtgggcactcctccaccttcatgtgggggcaggtttagtgctgttttctggtggtcctggctgtagctggcagccttctgggggcttctccagactccgttggggcctgggattgggaacatgcccccccgcctctgccgtgggtcaggcctctgctagatcactgttttaaccaggctggaggtggggatgtcacatctcctgtgggtcgtgttttctggataactctgcagcagacactccttccccagcgtagggcagaggccgttgctgtgcaggtcacgtccttccccatgtagccgttmctgcctgagcctccagcgcggtcacccaagtgacacctgtgctgtgaggtgccttctctccaakggctcgggtgtcaggttgttccccctgccatgtgccattccaagacacagccagaggggggcaggattagggagggtgaagcgggcctggtacgtccagctcagcagtggcctgtccaggcttccctcatagggacttgttgaaagagcggcacagacgcaagcctccatccacactgtgagaggaaggaagggttttgctcttgcaaacactttttaacctacagagaggaagcagagccacgttgctgtgtaacagaatggaccatggatagcactaatggagttgctgtgccctccccaggttccaaatcccctcatcacccaggctgcgcaagaggctgccagggtctgcttgtgccaggaatgatgggcattatgtcaggcgaccctcactcaagcttgctgtacactgagcaggggctgaagggggaggtgggagctggagtctgggactgctagagcatccagtgacctcgagtgggtccaaggcgccatggagtccagtgtagtgtcctcgcccatgtccctgggatgacagtagctgtggatctccctccatgtagctgtgacaatcagagctgcttcccccactgagtgggaacgccctctctttccatggctcatactccccaagcatgcaccttccttgctggcacagtgggccatgtgcccctcctcctgctcgcccttccacctctgttggacatcccagcagcatcagatgtgcctgtgtctggccctcagtgtgcccgcctgttaccagctcctcccatgtgccttctgtgtcctgtctccaagatcctctcagacatggaaagactctgcttggcccggcgcggtggctcactcctgtaatcccagcactttgggaggccaaggcgggcggatcacgaggtcaggagattgagaccatgctcgctaagtcggtgacaacctgtctctactaaaaatacaaaaaattagccgggcgtgatggcgggygcctatagtcccagctactcgggaggctgaggcaggagaatggcctgaacctgggaggyggagcttgcagtgagccgagatcgtgccactgtactccagcctaggtgacagagcgagactccgtctcggggtggggggttggagataatggaaaggctctgcttaacccccaggtccctactcctgtgaagccagaccccttcctggyggatcccttccctggatcaccagcctccagcacggaggtccactggatatcaggacgttgaacttgttgagcacttctcacccgcagtggaggctcagcccttccagcccgccggcctctccctaccccccgggaaggagtgtcagctatacccttcactgaggagggtgtgggtctgtcagacgccgaggccatagtttcaggaacatgaaggtttggtgttgctctcacccctccgatggaggacccttaacttcctgatgaaggatttctctccatgaaccccttgcttgggtcctatctgcatctggtgtgttgtaggcagactgcttgccacttcctggcttccctctccatcattttatcttcagcctcccacatccctgtttcaaagccatgtctctcatgagcggttcatagttggtctgttgttggatcactcaggtcagggtgggactctggaatcaacgaatgtgtgttcattttttccaaagaaacaaaagcacaggccaggcrcggtggctcacacctgtaatcccagcactttaggaggccaaggcaggcagatcacaaggtcaggagtttgagaccagcctggccaatatggtgaaaccccatccctactaaagatacaaaaattggtggggcgtggtggcaggtgcctgtagtcctagctacttgggaggctgaggcaggataatcgcttgaactcaggaggcggaggttgcagtgagttgagattgcgccagtgcacttcagccagattttatctaaaaaaaaaaaaggggggcaagggtccttatgtgatatctctcagttcttcccttttgcaaatctgaatttgtatatctgggcctggtaacccgttttcctggggagcccatcgccagctgtgtggagatagcagccttaggggagcaggaatgctggctgtggccaggcttcttggacaagctttcagtcctgtgaaccctgggccgtttcctcatagcagggtgagtgtgatgatcccgtggcctcatggctgtgtttctgggcagcgtctccagctgtctgagatggcagcagtgtcctattgaaggagctccagggtctttgtgagggaggagagtgatgggatcctagagtggcsggttgaatgcctccaggcattgagtgagattctccttcaagggcttgtgaggcatttaaagtacactgaggccgagctgcacttggcctcaataagcacatgatgtytgattaagattggagattgcctacgctttagaatctgaccacctgtgaccactggaactcacctagagtgggggctcctgctgagcactggccctctctccgtctcctgccccatctcccacctgcccacagtacccccactgcccagacacagtgcagccgccctccttcctccccttggcctgttagtcatcagcgtctgccgtcctggctcgtgtggcctgagctagagccgggaggccaagagatggctggtgcccaggaccaacttccccgtgatcagtgtgtggcaatttgctggccatgctgccagaccctctggcacagaaaccagggacaggaggaggcaggatgcgagcaccctggtgagctgccaggcggcctgctggggtgggcacaggtcagtgctaggagtatccatctcgtaggccttcctggtgccactcagcagagacatgtgaagcccttcccagggccaggcaccagctggggtcagaggtgcccagcagagcataacgcagaacctggacctgtgggcgacgactgtggagaaaagtggggatctgctgagggggcagggcaggcaggagccggctgagggcaacgggaaagtcaccaggtaccgtcctccacacctagctttgccagattgacgtttcagagggtgaataatcaccctgtggctgcccctggccccagggacagagctctgccccttcagggatctcagatgcaggttgtgtaaggacagccttgtgccaggttggaagccaggcctggaagcagtgtgctcagagcagcccaggcggcccacaggcgagtggaggggaacaactagggaagtctggccaggaggaggtgactgcactgaggggctggctggcaggggtctctgcctggaggctgagaggagctcaggttatttatgaaggcagtatagacctatgtggagcttgaagcccagtgtctggatcagagtctgctgggctgtgggcccagagctgggagccagccactcactyctgcagtgtccgaagtgatgaggaggggctgggctggagccagtcttgcctgctggccgtggccacagggggtcctttctgctctgactcctggcttctgctgccagggcttggaggcttggaggtggcctctgtcccaacaagagtcctcaaaatcctcagtttgtccaggtgagggatcctgggtgggggaggttcccagggctgcggcagmacagaccataccttgtcagtgtcaagccctgactgacccaggagtgccaggtggtggtgtgctcaytgccagaaaggggccagtatttgaagagcagtggaatgtgctgggcacgctgtgcaggcattcctcagccctcctggggctctaagggtgttattggggtatgctgccatacagaatattagaaagcaaaagaaagacgcggttgtcgggaggcagagcttgcagtgagccgagatcacaccactgcactctggcctgggcgacagagcgagactccgtctaaaaaaaaaaaaagacgcagttgtctttgacctgcgtaatgttgaccgagattcgtgtggtttcacattgtttaaatttcatggaaaactatggtcccgttgtaaaaaccaagtctccaggtgaagaggcgacttgcacttcctggtgctgcccctggaccctgatcctgctctctctgcctcccaggcaaaggccggcgtgtgcagccccagtggtcccctcctgctgggacccagccatgcagactccacctttacaacagcctcaccaggaacaaggtaaggagaacacagatgccgtggcacacgcacacaatggggaggcaggaggcaggacagcccatgtgccttgtcgcacaacagacttctctgttccttgtgttgggatctggagttccataaatccaggtttaagatccttcagtcacttccatgttatagtctctgtggcccagaggcagagctgtcctctgaaacccagacacgtgaagtatcatgcctcatgtggaagcctgcccatgacttctgggcatggatcaccctggcttgtctctcggactctgcccaaccatgagtactkgaggtcatccacagccacgcctttcaggaggacgcgtggttgcagcaggtggcactgtatgagccaagcaggatggacaaaacggcaaactggctggatgttgttgggagcacagcaggttttgagaagaaggcaggattggttcctaacagaatggggtttgcatggtttgcttggctcagggcatggccagtgactccagtgatttcagaccaggctctgggcggggctgcttggatttccatcagggagcatgtttggcagacagagagtcaggtgtgagggagttcatggccttccttgggaaactggttgaggatgatgcccccagagaggtctgagggtgctgggatgttggggagtggtgccagagcagcaccacgattcaggggtcctggcctccaagccgcgctcccccaayagggactgaccctggccaagtgttgtctgcctcagtttcttcatccgtaaaaagaaaatgacataacctacgtcctagagtgtactgcatattgaatatttagctcagggcctggcacatggtaggtactcagtaaatattagctgtgttattgttaaataagcagcatttcaacaatcaataaaatcattgattccctttatcgyctccctccatagatgagtagaaccccagggaggaagaggccccacccacccagggctcagttggtgggaggtgccgtacatctcactgggctcccactgagactgtgacttttcacagtaaaacaaaatggtctctgttgaattgtttacactaaacacaaaccacactgtgatgtttgttgctgtttttggtaatcctgtgcagtgtttcttgcatttcttgtgatcgtcattccttcattcctaacaaaggaagtgttcatacctcaagatgggaaaaaggtgacgtggtattgctgtgggccaaccgtctatgacgcatctcacatggggcaygccaggtaggtccaccgcggggtgtccctgcagcttctgcagttgcacgcagaagtcagagccattgggatccacagcagcgatcttaggtccacaaagatcttagatctgctacagagacctgagatttgaggaatcragactgaatttcttctcttatttttaagatgaaaattttaatkccataagtaatctatattcactgcagaaagactacagatcaccaaaaagaaaatgtccatagccccactgctaacatgctggactcgacctgggcactttttctcacataccttaaagttttctctcatccctcaagctctcgtggggtccccagatgctgagttcccrtgacactcagacctgacaggcctgacgctgggttggctgtgaccgccccccgaccactggatggtcatggctgtagctcctgacgagtagctggctgttggggtaaatgccacagagtccttttatgtgttcatgttttagttgcagtgccaaggtcatgtatagtcaacccttgaacaacctggagggtagagggtgtgaccctctgcacagttgaaaatccacacataacttttgattccccaaaaacttcaccactaaaatagcctcctgttgaccaatagcatgccagtcaatgaacacatattttgtatatacattacatactgtattcctaatgataaaggaagccagagaaaagaaaatattatgaagaaaatcataagggagaggcaatatatttactattcattaggtggaagtggatcattataaaggtcatcatccttgccatcttcacgttgagtagactgaggaggagaagggggggtcttgctgtttcagggatggcagagaaaatcatatataaatgcactcatgcagttcaaacacgtgttgttggaggttaagctatacatatcgtctggtgtggaaatgtttgttttttcattgctttaggtcctacatctcttttgatatcttgagaagagtgttgaaggattacttcaaatttgatgtcttttattgcatgaacattacggatattgatgacaaggtaaagggaatttgtaagattaaattttaaatgcaattggatggtgtaaaagaagatagaactttcgcataagtaaataatgtaggcttgagctagcttgtgttttcacctgataaacatcattttaatcccctcagtgagttaatattaccacttctgctactgatatgatcatttctatgatgttcagacacggttagaaacctgcatgttgctcaggggtcggtagcccygggtgttttgcagaaggaaggcctcccacagcacgcacttcgacatgtggcttgcaggggaagctggggcccccagggctcatttcattaagcgtcagaaagatcaygttaggccttgggcactacttggcaggtgggagatggagggtggtgtttctatttgatgatggtgtgcacgtccggggcccacagttgtctcccaccaccctcaccctcacttagagttggccaagggagagagtggcctgctgcagagggatgcatgtgggatccaagcatcactccccaatgtctgccttccctccccagatcatcaagagggcccggcagaaccacctgttygagcagtatcgggagaagaggcctgaagcggcacagctcttggaggatgttcaggccgccctgaaggtgggcctcttgctgtctgctctagaaaccgagccctttgctttctgttctcggtcctttgtaggctactgtccctagggtagtgtcagtctcacaggctttcacaaagtgtatgttactcaagccagttcygtcaggggcgctgaagtctccataggtaaggtcccctggcctgtgacaaagtcaccagcaaagatgtactggagtggagtggagagtaggtgacattcctgccacttacaggaaaacaactgaattcatcacagtgccactaattacacttataaaaatgcttaccaatattgctgtctaattttcaatgccaaggttacaactaaatcagaaacttctgcccaagatacaaaagctatactaagctttttaatttggtaatactgtaaattttcagaatcttttgaagaaattagttctctctagtattttcattctgaataaccatcgttatatacttatttttattacaatagtaagaataggtcattttactctctactaattatccttagtaattacagtaatcattatggatatgcttatggcattttatctctggaattaaaaacaggaataaaattagagctgagcaatcttttaggtcagtgaggcctgagtaccttcctgatggatgtgtctgcagcacacctcagaacacactgggtggcctacttttcctcatccccagaacagccctagaaatactgctctcacacccaatttgcattggagaaactgaggcacagagaggttaggtgccctgtccagggtcacacgtgagagggcagaaccaggagctcctgagccgggagcttcagtctctcttagttccttactgcctggccacttgggttgcacacttctctatctctatggggccatgggaaaaaccgttctgttttctacctggaatcacctttatgaatttaggttttgctgagcagtatctaatagatttgacgtctctttatggttgcagccattttcagtaaaattaaatgagaccacggatcccrataaaaagcagatgctcgaacggattcagcackcagtgcagcttgccacagagccacttgagaaagctgtgcagtccagactcacgggagaggaagtcaacagctgtgtggaggtgaggcttcacacatctcccagacagcccgttcgggtcaaatgtcgggccgtgcatagactgatctgtgtgcacggattgattccacagattgtcttagtggaagacactctgtgtctccagtagctccactgtggcaggcggccctgttctgcrgtggctgagtcagtgcccctcccctcccacacccctttgccccatttcctgggtgcagagcctgtgccactggaaggagactcgggatccacaccctcccaccacttccatcagataggcaggaggtgcacttggaacgtggggaggcagccttctgtcgaagtgttccaagattctccagcggactctccccacaccagctggagaaggaggagcagggattaacattgaattgagcattgaggcctgtgggtacctactgagcttggggccttcacgttgaccagctctcctgcccctgccaatatctccttcagacacagggcagagacctgggtgcagaggggaccctgccctcttcctcaggcctttccctgtggctggcgccctggacacagtcaggaaggccttctcctttgtgccagcgccgcctgctggtcaccctttaagaactcgatggaaaagagaagagacggctgcagctgtgtgtagaaaaagaggccccactgaggccgcagccctgccttccctcaccactgccctggccccacctcagtgatggggcagggagtctgtgtctgcccttcgccagcatgtttctttctagtttggtctcttctgtgtcctgactcagcagatcgcttcgttgcgcctgtttccaaacttcacggaaacacgccacgtgtatgtagtcgtcagtgtgctttcacccaagctgtgcttctgggacgacccacatgtggtcactgtcactgcctcagtgcctgcctgggagccgagctgtttgtctgttctcctgggacgggcagttaggtttccttcttaccaacaatgctgctgtaatttttttcccagttgttccactaatattctttttttttttttaattgtggtaaaacacacatcataagaaatttaccatcttagccatttttaaaaactttttttttgtagagacagggtctttttgtgtctggtttattttgcccagcatagtgtgcccatggttgacccatgctgtagtgcatgtcagactctgcttccttcctatggctgaatgatactctgttgtgtatagatgggccacattttgctcatcctttcacctgcccgtggacacgtgggttgtttccaccttttggagatgcaagtaatgctgctataaacctgggtgtacaaatatctgtttgggttcctgctttcacttcttttggggatatacacggaagtggaattgctgggtcatgtgatgattctatttttgatattctgcgtaaccaccgtattgtttctgcagtggctgcactattacacattcccacccatagtgcatggggttctgttttctccacatccttgccaaagcttgttattcttcatttttttcatcccagtaggtgtgaggtggtatactgtggttttggtttgcatttccttaatggctagtgatgtggagtgtcttttgctgaactgtgagttgttttgtgttgtctctaggtggacatttgcaagtttctttaggccatatacctgcaagtggaatcgctgggttgtgtaggatatatgtgagtgactgtcgggggttcccaacactgcccacacattctggggccctagaaggactcatgagactcggcatcgagttatcatcttgtctaaggtttgtagcagtgacacagcgaggagcaraagctcaggcggagtcttcaatcatccatgggcaggctgctgaagcttcctccctgcctcccatgaggggacacagcacactctcccccaccaggaaaaaaatgcagccacatgtgtgaaatgtccctccctagggaagcccatcacataggcaccctctgcctggcacgtgccgcaattcctgactccccaggaggaaagctggtgttccacctgcataagccacagtgtttgttcaacagcccactgggggctgctgccacagagctgggtttcccggcctcttagcacaggggacatttcagctcctggatgccagctaatggccagctctgtaggcaggcctttctcaggtggcagacacagaccttctaggctcacttttatcttcatagtagccatatcagaaatgtctatatggccaggcacagtggctcacacttgtaatcccagcactttgggaagccagggcaagaggatcacttgagcccaggagctccagaccagcctaggcaaaatagtgagactctatttctacaaaacttttaaaaattagccaagcatggtgatgcaagcctgtggttccagctactggggaggctgaggtgagacaatcacctgagcccaggagtttgaggctgcagtgagccatgaacacaccactgcactccagcctgggcagcagagtgagacccagactcttaaaaaaaaagaaagaaatgyctatgcaaatttcttcttcttctaccacattttgggtgtgctgtgtatttgcacatacacctgcatttgtattgttggattcttccctttcatcagtcaatgaatgtgaagtgctgattgctgtggtttgaatgtccctttttccaacctctcctgagactgagcatcttgtcaagtgcttgcttccagctgtgattctgtgcccccatctctccccctttcccatgaggttattggtccttttcttactgttttgtatcattcttatgtcttctgatactaattactatgatttgaatgtttgtcccctccaaaactcatgytgaaacttaatccctagtgtaacagtattaagaggtaaggccttttagaggtgatcgagtcatgagagctctgccctcatgaatgggttaatggattaatgggttatcacagaagtggggtagttatcatgagagtggggctgttacagaagccagtttggccctcatgagccccctggccatgtgatgctctgcgccaccttgggactctgggaaaagtccccaccagcaagaaggcccagaacagatgtggccccttgaccttgaactttccagcctacagaattgtaagaaataaattttatttaaaaattacccattcccaggcagggcatcgtggctcatgcctgtaatcccagcactttgggaggctgaggtgggcagatcacgaggtcaggagatcgagaccatcctggccaacatggtgaaaccccgtctytactaaaaataaaawaaaaaaaattagctgggtgttgtggcgtgtgcctgtaatcccagctacttgggaggctgaggtgggagaatcccttgaaccagggagtcagaggttgcagtgagccgagatcgtgctgttgcactgcagcctggcgacgaagcaagactccgtctcaaaaagaaaaaaaattttacccattcccggccaggcgcagtgggtcacgcctgtaatcctagcactttgggaggctgaggcgggcggatcacctgaggtcaggggtttgagaccagcctggccaacatggcaaaaccccgttgctactaaaaatacaaaaattagccaaatgtggtggcgcgcgtctgtaatcccagctactctggaggctgaggcaggagaatagcttgaaaccaggaggcggaggttgcagtgagccgagatcacgccactgcattccagcctgggaaacagagtgagactgtctcaaaaaaaacaaaacaaaacaaaacaaaaaacagaaaacaaaaaaaagaacaaamaaaaaaacagaaaacagactaagacacgaattcatctctgttacatgttggcrtgtgtttgtgtctcttaattctgttctgttggtcaaattgtccagcccagaccaggtgcagtggctcgttcctgtaatcatagcaccttgggaggccaaggcaagaggatcccttgagcccaggagtttgagatcagccgggacaacatagtgagactctatctctacaaaaagtttaagaatttaaaatttaaaaaatttataaaaattgcccagtcctgcaggagtatcatgctgtctctcacaggtatctgatgggtaagaggccccatcttggttttgtcgttaggtgtgttttgaagcctcagcttgtcaagttccatgtaagacactgttgggattttacatgttgtatctaagaaccatctcagatccagtttggctgtgttgatcctctgtagtctttttgttttatcagtttttgtccattctttattccttcttttcttctttttcctttggatttattctgtttttcttkgtctcacttagcagtttagcttattttctgatttaagaatttaaggctatacattttcctctgactgtttttgctgcaaaatttgacatcatttacttgtaaacaatttctaatttccattttggattttttagcccaggaattatctagaagtaattacctaaaagttaattatctagaattacttagaagttttaaatttccaaatttaaattggatggtactttttcatattaacttattgttattcgcttataacttaattacccagtggttggagagtatggtctgtcccaatctggatctgtgaacagagacttgtgttgtggcccctgtgtgtgctggtttctgaatgttctcttgtgcttgagaagattccgtctaatcccctagtgcacagttccacatgccatccacttagctatacctgttggccgtgtggttaatattttgtgtgtctttgctaattcttcctgttggcttagcctattcatacagtttcttaaaaaaacaaaaacaagaaccaaaacaaaactccccctctgatgatgaatttgtctgtttctccttattttttcactttttagaaaaaaaaaaagttctttttttagaggagattctggttcacatcagaattgagaggctatatatatcccctacccacctcaccgtcacctcccccagcatccgcacccaccagggggtacgtttcttacagtcagcgaacctgctctgagcgtcattaccctgagtccgtggtttactttagggttcactctcaggattgttacatcctatgggtttggacaaatactatctcgtatccaccattacggtatcacacagaatagtttcactgccctgaacatcctctgtgctccagctattatcccttcctccccaccccaactcctgacagcagctagtctttctactgtctccgtagttttgcctttcccagaatgtcacatacttggaatcctacagtgttgcagccatttcagatcrgaaaaaatttttaaacagaatacttcacctctgatcaccaaaatgcatagggatttcttcctcacccagcccacctctgccccgacaaccagtcagttctctagcaggcatcagctgggagtcctaaaatttaattcatttccaacacagtttgccaggaggaagcgtcagatctgacaggttgaagggctcagtcccataagactgtccccaattcagatgccagttgaaagtagtagtttgttacctatacttctgacctaccagttattggccgggcgcggtggctcacgcctgaactcccagcactttgggaggccgagatgggcagatcatgaggtcaagagattgagaccatcccggccaacatggtgaaaccccgtctctactgacaatgcaaacattagctgggcgtggcatcacgtgactgtaatcccttctactcgggaggctgaggcaggagaattgcttgaacccaggaggcggaggttgcagtgagctgagattgcactactgcactccagcctggtgacagagctagactccatcaaggaaggaaggaaggaaggaaggaaggagggagggagggagggagggagggagggaaggaaggaaggaaggaaggaaggagaaagaaaagaacagagtgcactggtatattttggaatgcttcctttcccttcttgctattggaaacacaaggggatttttctccaatattcactgtgaggcctggtcaggttcctagaggtaaaactcacaaaagtatggggtcccctatgactgggtccctggggttttcaactgtctgacttgcctacaccaagcctgcagcaatctctgttacagtcctggttttcctcccccaacactggttcccacagaattttcagcttatgagtctctgcyctggtaagttgtgattgtctgtcttctcctgttggtctctccagtttagggggcagtggtttgccctatgacctaacttctcttatggatctaagaagagttggtttttcagtttattcagctttttacctgttgttaggtagagtggcaacttccaagctcctgacttatgtgaaactggaaagcagaagtctcttatcattttgtatttatgcattttgattgttgatctgtatgcttgaccagcaacattgagtattccagccctatcatcaggcaagttttagaaacattatcttagaagtattggtgggaagcagcttttgtctatcttgaagtgtgtatatttccctgtttgttcaaggtggttgccgtcttctggcttccattgttggctgttgttgaaaacatcggctgcccttcaaattacttttctttgatyggtaaatatgtcttttctatcaggcgcattataaaagtattctctcttttcagttttctgctatttcacaaagacattgtaagagatttgtttttacttatcctattggatattttgtgtgcttcccggggctggattgttgcatgggttttgagaaattctcagatgtgtcttcaagtatcacctttactcgattccctctctcctctcctctgggttgccaattagatgtgagtctcatcatttcatctcatccttctccgtgtctcctaacctgtctttcataaaattttccttcttgtctctgtttcattttggatgacttcttcagttctgtcttcctgttcacaaattctccttcagacaggaagtgaaacagtcactcagtaggatggataagactgtttcgcctgttaatagatttcatctctgcaggttccgtttgcttctattttcagatccagctgggccgctttgctggcctgtccctgcttgctattgcctgtcatctgggagtccgtccttatgtctttaagcctgtaatatttactggattttattatgtatctgataactcctccatctgaagcgtccatctgtttgtcgtttctgctgactcccattcacagttgctcatgttcttgggtgtttggtgacctcgattaggatgtcggttcttgctgggtcgtgaccttggtgatcctgagggccaggatgcgcgtttccctgtacttggggcaggcccagtgtttgcttttcgggcagcagacttggcagcctttgctccccagagcgcacaccctgcttttggtgcttgtctgcccactggatgccctgccgcggtggggagggtgtgctcattcctgcagacgtgccttgccacttgcaggcctgcaatacatttaacacatctgtttgattcaggagctgtaggcagggattgcatcaggaacctggcccacgtgggccctgtgccccttctctgtctgtgttgtggctttgtccaccctgtgtcctygctgtctgccaggccattttcctacactttttctctccagccttggttctttgcctccccttcccatagtasgccacagaccatctgcttggtgccacgccctgtcctgggtccacgtcagtgcattgagactctaggtccctccaagatggcggagggtagacatttctcttttctgacatgagtgcagttggggcgtgtctcatgcctagagtgtgtgtggtcaggacctggttcacataggtgccatgttttgctgggattggtggtttttactcccattccatggtgtgtcaagtggggatggcatcttcagtcaatggcgtcagggagatggggcttttgagacctctgggaccagtgccctgcctatctctcctaacctctggctgtgtccgtcatgaatcttttcctgaatgcaccaaggggttgtgctgtaggtgacacactgtgtgctcctgcccagcctctgcccataaccctgccctgcacggcccaggtaggctgcacrtgctcaccaggcccacctcggccctcccacctctttttgcctctgcacccacagtccccttggctttgctcctctgagttcatgtgagacctgcccatttgtagagtcttgtatttgtccctgccgagccagttgtgtaagcatcacagtctccctaggagacggtggctcttcacaggtcaaggtcagcacctttgaattcagggcactgatgggctcacaccagctgcacgagatgttctcatgtgaagtgtgtggcccgctgctggatttttgtttctttctcttcaggtgttgctggaagaagccaaggatttgctctctgactggctggattctacacttggctgtgatgtcactgacaattccatcttctccaagctgcccaagttctgggagggggacttccacagagacatggaagctctgaatgtaagtgtcacgattgtcttgtgctggctctcttgcgctaagggccctgatttctaaattcctgttttggcaaggccagctcaattaagcrgccaagtcaacattgaacttgagttgaggggcataatgggcttttcgttttatgaattgggaacgtttttatggagcgcgtggttttcagaagggaaaatcccaggacattctcatgtcttgcacaggttctccctccagatgtcttaacccgggttagtgagtatgtgccagaaattgtgaactttgtccagaagattgtggacaacggttacgggtaagcacaagggccytccctagggagggaagggctgcagaacatcgcacagggaggagctccccagctctgagcctgagtttgggaarcagaggagcaggtgttctggggctgcgtagctagaagtcccagcagacttcctcctacaactctgggcccacccaggggctgaggagcatgggtctgcactgtcctgggggccatggtgagaacctaacccagaatctgctgggaagctcggmagccaagaccatcagtcatggggccccagagctgcataatggtgagtgcgaatactgctgggccttcacagacatcagtgccattgcgtagacattttgagagtgctagtcctggtgtcatatcccgaaggaggatgcatktcatcagcatctatcgcttggctatgattttagtgactttttgttggcaaatccatcatacacttccctggcccgtattgtctcaatctccaaagtaagcattttcagaaatggccaacaaatggaaatgcagacaggaacccggttatctgtctgtagtgtgtagggaccagccccacagggtcggtgggtttttctccccatgtgtggagatgagagattgtagaaataaagacacaagacaaagagataaaagagaagacagctgggcccgggggaccactaccaccaagacgcggagaccggtagtggccccgaatgccaggctgcactgatatttattggatacaagacaaaggggtaggttaaggagagtgagccatctccaatgataggtaaggccacgtgggtcacgtgtccactggacagggggcccttccctgcctggcagccaaggcagagagagagaggagacagagagagacagcttacgccattatttctgcatatcagagacttttagtactttcactaatttgctactgctatctagaaggtagagccaggtgtacaggatggaacatgaaggaggactaggagcgtgaccgctgaagcacagcatcacagggagacggttaggcctccggataactgcgggcgagcctgactcatgtcaggccctccacaagaggtggaggagcagagtcttctccagactcccgcggggcaagggagactccctttcctggtctgctaagtagcgggtgtttttccttgacacttacgctaccgctagaccacagtccgcttggcaacgggcatcctcccagacgctggcgttaccactagaccaaggaacccttctggtggccgtgtccgggcataacaggaggttcacactcttgtcttctggtcactcctcactatgtcccctcagctcctatctctgtatggcctggtttttcctagattatgattatagagcgaggattattataatattggaataaagagtaattgctacaaactaatgattaatgatattcatatataatcatatctaagatctatatctggtataactattcttattttatattttattatactggaacagctcgtgccctyggtctcttgcctcggcacctgggtggcttgccgcccacagtagtgctcagcactgtaccgtgcgcctgctcccagagacccactgtgtccagcctcagattgcttccctcccacaggaaccacacaggctggmtgaaagagaaacaagaggttgtgacagtgccaggaacggggcagactcttaagcagtagcgctgcttctctccccacttcacacaaactactgtggggcagcataagagcctgtgccaagccgagaggcatgggcaagccgaagctcagagaggacaggtcattccagactggagtaatctagagtgcttcttggaggccaagagcctcagctaagctaatgggtagagtgtggacattcagggaaaggtgaggccacacaagaatgaggacggcagcagccctgagcaaggcagggtgggagctgcatgggtcacaggacgccaggcagagggacgagctgcccagggcaggcaggctgcctccgcagcgggatgggccctggtgtcccactcagtccaaacagctgatacrgttttcagtggccaccacagagagtagayaggccacagatttcgcacttttatagccctgctttattttgttactgtcatcctgctgacacactttcgggtctgttagatgcacccacccaattccttttctgttttccagctatgtctccaatgggtctgtctactttgatacagcgaagtttgcttctagcgagaagcactcctatgggaagctggtgcctgaggccgttggagatcagaaagcccttcaagaaggggaaggtgaggagggcatgcctgagagcatgtgggctctccctcctggcccagcctgggttgtgttgactttgcaggccacgggggctgcgctgagcccacccctcagactcttgggaacagtgctttttcacctgaaggaattttaggagttttctgcactcaacattgtgcagctctaagaccatgacatgtgtttttttaatggatatataataattatgcaatttatggggaacatgtgatgtcttaatacatgcacaccstgtgtgatgatyggggtagttaggatgctcgtcaccttagacrtttaccttttctttgcattgggaatgttccagatcttctggctatgttgaaatatacaacaaatgttttggtaactatagtcaccctactgtgctagtgaccacaagaacctattctttctgtctgtgtgtttgtgcctagaaaccaacctctcyccactcactgcccctgacctgacccttctcagcttctggtgaccactgttctatgctgcacctccttgaggtccaccgttttttagctcccacataagagagaggacatgtgatatttgtctttctctgcctggtttatttcacttaacagaaygtcttccagttccatccatgttgctgtaaaagacaagatgtcatttttttatggtgtgttattttttaagaaacaaaagacagtaaacgcagtgctgtcttgagaaacayagtggcccctggggcctggattcacagggctggtgtttgctggctgagcatgtgaggtttagggggattgtggggtgctgggatgtgtgccgagtgatgcatatttgacaacagcctgtgcgcccatctggatccaaatgcttcaaacacagatatcagactttttctagaccaggcagaattatattgggaaccctttcgttggtgttttcttcatgtttatcccttaagtgaatctggggacacatccacaagaggcaaggttggaagcctccctgcagagtggggattcccgcaatgtgccagggcacgttctgcacccccaccccgcctgtcctagtgtttctggaagacaatttggccataaaaatgttcatacttttatctaattttaggctctattctaaagaaatatcagaacctaaaataaaggtgcggtggctcacgcctataatcccagcacttttggaggccgaggtgggtggatcacctgaggttgggagttcgagaccagcctggccaacatggcgaaaccccatctctactaaaaatacacaaattagccaggtgtggtggtgcttgcctgtaatcccagctactcaggaggctgaggcatgagaatcacttgaacccaggaggcagaggttatagtgagccaagattgtgccactgcactccagcctgggtgacagaatgagactctgtctcaaaaaaatatataataaaataaaaccagacaacacagactgaagaaagatagagatagccaggttgacacataaatatcagacccatggcatttcaggctccgggtttgtgggagtagaggggcgggtttgtgatgatgaagcgcctcagctctgagaggatgcagcctgggcctctrgaccagaaggcttcactaccctagaaccagagtggacatgcccacgtttcatgcacttcccaggagytgacagatcaagtaggccaagaattaatayggatatgaaaggtttgaaatacagttaacaggcttggtttgagagctgggaactttgcactcaggaattaaagaacatcctttccttccaagaacacagaaacatatgccaggccacagaaagatttccacaaatctcaaagaaccgttttcaaggaaccctcattctgtcaaggagccctcattctgtcaccatggagcgattgtattagataacaacacttggccagacatggcgacccacacctgtaatcccagcactttgggaggccgaggcaggaggatcgcttgagcccaggagttccagaccaacctgggcaacatagggagaccccctttctacaaaaaatttaaaaatgagctgggtgtggtggcacgtgcctatagtcccagctacttaagaggctgatgcaggaggatcacttcagcccaagaagtcaaggctgcagtgagccctgattgtgccattgcactccagcctgggcaacagagcaagactctgtctcaaagacattaaaaaaawttttttttttaaataaaaaagataccarcactgacaggacggacgtctaaaatgtacaaacttgtctggggggttgaaatcatgctcctggataactcctaggaaagaaaaccacagtgggaaatcaggggtgtttaagcagaacagcagcaaaggtgccacacaccaaatctggagaatgcccctaaagcaccaattagaggaaactgatgtttttaaatgtagttattaaaaaacaaagatggaaaataagtgaggtgccgggtgcagtggctcacgcctgtaatcccagcactttgggaggccaaggcaggcggatcacgaggtcaggagttcgagaccagcctggccaatgtggtgaaaccccatctctactaaaaatacaaaaattagccgggtgtggtggcgcatgcctgtagtcccagctactcgggaggctgaggcagaagaatcgcttgaaccctggaggcggaggttgcagtgagctgagatcgtgccactgcactccaacctgggtgacagagcaagagtccatctcaaacaaaaaaaaaggaaataagtgagctaagcagtcagtcaaaaagctgggaaaggaacaagaagaagtagaaagaaataggaggaaataaagtaaaatcagagattaaagaaacagaaacaattgtaaaagccaaaagctgattcttctcaaaaaataatatagaagaacccttagcaagtttgattaataaaagtagaagattgaaaaacatattagggctgaattatagctcatgcctataattcagcactttgggaggccgaggcaggaggatcgcttgaggccaggaattcaagaccatcgtgggcaatgtagtgagaccgcatctctacaaaaattttaaaaattagctgagtgtggtagcatgcacctgtagtcccagttactcagaaggctgaggtaagagggttgcttgagccagggaggtcgaggctgtagtgagctgtgattacaccgttgcactccagcctggctgacagcaagatcctgtgtgtgtgtttgaatgtatgtatgtatgtatgtatgtttgaataacaagacaaaaatggaatgtaactatggatatagtagagcatttcttaaagtccttagaggaagccgtgaacaactcgcactgcatttgacacttagatgccgggagggaactggcagcacatgggaaaggtgggagtggtaagtggagcagtgccctcaggtcacgtggtgaaggaatgttctggaggcagctagagcacactractcaccactttatgatgaattttgctatctggccccatctagggtctttttcttaaataccatttattcttgggcccattttcttccagaatgacttcagcattggtttaagttccaggaaacaggagtagaatctaacagccaatatgcaggaccaaagagggacatggatttccacccctccacagtcagtgatcagacgtgggcacatgaccacccccgcaacctccccccaccatggggagtcataaggagtgtagccttagctctgtgcagtcatgtgctcctcgccatggggactctaatggtagaggaaaaggggaggggtgatgctggggcccaagtggtcctagatgatgacagctcctcactccgccaagtaagatgacccaccagaggcagatgggccatgcagaccactcgggaaggcacgtggcaggaaggcctagtgcagggaggaagctcccccagtgggagagaacaggaccctgttgtgctggtatgaacatgcttgtagggtcaaagctagaaacactcactctgcctctggggagagagacaggaaatgaaaccaagaaggaaaacttgaaagacattgtgttgtaaccataataggtctgttgcccaatgcacagcgagtcagtataccgggataccaggggttgccgtagaagaagcgtagtaattgtatggtggacaaatggagatgggaggaaacctcagatccgcctccctgagatytggggaggggtttttaattgctctggacaggtgatggggattgccggttgctggggaagtgaggggygaagtcatgggacagggaggtaaaccacatttctgcgacgagtcagttccttggtgcaggtcttcagaccagttggcaacagctgtcctgctggaattcaggatccaaaaaataccttaagcagttcttggtaaaaaggtccagggttagagattctatcgctaggaacagtggtggagcaggtggtcagcgtgctatgtgactctcagttagagctgcagggaagcggatggacgtgcactgcacctggccagtgaccggcctcatcattctgcctatagcctgccttggaattctcattaaccctatgagggcagttgcagtgtgatgtttgctgaaggatagggtgtttgtggggagggtcctgtgttctctgttatcaattttttcaaagcgtatttttaaaaaatcagatataaactttcatgagtaagttcataataatgaaaagttgaaaacgtgaatgtatattttctatcaaagagcatctaaaagcgaatgtcatgggccatatcacattgtgcttttgcggaattgtcagtggcagaacagtgcggaggtagaaggaagccaggacagcggccttccgtgttggtggatagatctggattttgcttgcagaggttttttgtgtttttgtgtgtttgttttttaatctgggaatcagtataccaaaatggtaacagtagtaattcctaggttaaaagataatggcaatttttttcctagttttctttttttatctttcaaatattctacatttagtacatattttataatcatgaacttggtgtttagaaaaatatatttagcggtgcttttcctctggactctgtttctcagggcagcttaggtctgttgcctgattaggctcctgaaaagtggatttgtcacctggaaagatctcactgcagcttcttcagggtcacctgagttagaaccctagatggagtctgttcttcctccacaagggggtgacagcacctaaggcagcccttagaccagggaccaggaaaggctgcagcagccgggcaagacctggcgtgggtcctggtaaccttatgcctagagtgaagacctctgctctgcccattcatcgaacaaagggtgattctctgcgtgacctttggactggctcacaggtttctttattcacagcagctaatcttttccattggtcctgcatgtattgttgagagaaatctgcagtgatggtgcattccttttctggggactcagaccgccttgtaccctgagtgtcaggtggctgagtgtcaccgagtcaatgcatggaattcaccaaggggttatttctcatccctctggcaaggcatagacagtcttgtttttgttggccaggtgatcattggctttgtccaggaaatagaacttgtgccaagagcagtactccccttttcttatggccttcctggactattctttagtttccttcacctattttccccttataaatacacaggaacagcaaatgtccccttcaccactgcactgccaccaggttccctgcagtagtacacagcagcttagctgcatccttgtatcccccgggacccataagcagatagttgtgcgggcccttgacatattgaccccacccgcatgaaccaggcaggatccctgagccatgccccagtggctgcaccactatgtcacctcctagctttagcccagggttcttatcacttgtcctagacactggtgggctaatgctgtgagaaggcagcaggaaggtgaatgtcttacggagaccccagatgtggcctcaagtcagccaggtatataagctggtgactttggggattatgtaccgttttgtaaatctagacactgggtcaacaccagaatctggtaatacatagttaacttgaagaaatgcttgagccaagttaataaacagaagttagtcagaaggactgcccattaggcaccgtggatggccttgaagtgagacatgtgggtctgtgggtgctgctgagtgaccttgcctggcgtccctcgtgtttgcaggtgacctgagcatctctgcagaccrcctgagtgagaagcgctctcccaacgactttgccttatggaaggcctctaagcccggagaaccgtcctggccgtgcccttggggaaaggtgagygagtggcctagaaggtgtggggcttggacaggggcactggcgccagccacactctcaggcccccagcagagggccgctctgtgtgtgaaggatgttgtcactgggccagagcctggtgctggtgcagcacaggctgcctggccccggggacctggacatcatggagactccctgagtctctggacaaatcacttcyctcctgggatttctgttttctggtctgtaagtggagatgtgatcagagtagaygtccatggaggcttcttggttcttgtgttctgtgactctgagtattccaggccccagggtgtaggatgcgttctgatcttcccggtgacaggagttgttgactgcagggtaccctaggaaggggcgtgaccatctgcagctgtcaagggctcagaggtctggatgtaattcagtaacttcacctaaacctcggcccacataggaccggtttatgaacttcaccaaagaaggctatccttagtcttttttttttttttgagacagagtgtcactctgtcaccaggctggagtgcagtggcgcgatctcagctcactgcaacctctgcctcctagtcccggttcaagcaattctcctgcctcagcctcctgagtagctgggattacaggcatacgtcaccatgctcagctaatttttgtatttttttgtatttttagtagagacggggtttcaccatgttggccaggctggtcttgaactcctgacctggtgatccgtctgcctcggcatcgcaaagtgctgggattacaggtgtgagccatctcgcccagccttcccttagtcttttcatgtgcgggatttaacgcttgttccaataaagttcagaggatgtaagggccatcaacttggagtgataagtgataaaggcctggacaagcgggtaggctggtcagtcactgtgtgttcggctttctccagggtcgtccgggctggcatatcgagtgctcggccatggcaggcaccctcctaggggcttcgatggacattcacggaggtgggttcgacctccggttcccccaccatgacaatgagctggcacagtcggaggtaggtgaaaacagagtccccttgtcaggtgcaagagcacagtgttcatactgcagtggaggaaaagtcagcccaggcctcagaagggcctctctcactagaacttgacaccttcatcggggcttgtgggtggaatctgaaccctgatcatttagtgtggtttccgcattgacagcctggcctttggcaacagactagcctggatttgaaccagttgtgttacctgctggcttattaacctgggctgtccttccaagccctgcctgcaccacctggaaaacrcagctcctgcctgtggacagcaccaacaaggcagcagacagtgcaggtggcaggaggcggccccagtaacacatgactgttgacatcctttgtctctttccacgcaggcctactttgaaaacgactgctgggtcaggtacttcctgcacacaggccacctgaccattgcaggctgcaaaatgtcaaagtcactaaaaaacttcatcaccattaaagatgccttgaaaaagcactcaggtatacactggcttctcccacagaccccccaaccaccttctcatacatgtgtaatggctgtagcactcrggagaataagggcgttggctgtcttgtgtccccccacagcacggcagttgcggctggccttcctcatgcactcgtggaaggacaccctggactactccagcaacaccatggagtcagcgcttcaatatgagaagttcttgaatgtgagtccccagccccttcctggaggttggtggagcagcctcccctgcacagtgggcaccttgtgcagtggtgataggtgcaccagcctcccgatgtctctaatggagaccagcacatgggtggaagcacctccatgctagtgggtataacaggctcggggccactcctgaaatggctgacggctcagcagagtggacagaggcctcgtcctcctagtcactgcagtgcacgtccttctgacttgtactttccaccaaatgagcatctgtaaacctaaagcaagarcatgtttctgtcaaaraaatatcttttcctttctttctgaccacttgtgtaattctggtctttcagatttttaccaaaaataaaatcacagcagtagraagttgtaacagatatttcaggatggaaaagttgcctaaatgctgttaaactgatttttctaacttcaggagtttttcttaaatgtgaaagatatccttcgcrctcctgttgacatcactggtcagtttgagaagtggggagaagaagaagcagaactgaataagaagtaaggtggtgccatttctttggggtttttgagcatgcccatgttctatgcctagcctcgcatcttggccaccatgtgtcctggactgtcgaggaagggctggggacactgtcgtacgttgtgcagaattaattcaggataggcggctctgctaatgggagctgctctgggtgttgaagtgcatggagaatttcttttttgttttttctttttgagacrgagtttcgcccttgttgcccaggctggagtgcagtggcgtgatctcggctcaccacaacctccacctcccgggttcgagcgattctcctgcctcagcctcccgagtagctggggttacaggcatgcgccaccatacctggctaatttcwgatttttagtagaggtgggggtctctccatgtttgtcaggctggtctcgaactcccgacytcaggtgatccgcccacctcagcctcccaaagtgctgggattataggcgtgagccactgcgcctggccacatggggaatttctatggtgtgttttcaggtctgacttcacattccttcctctttgttgctcagcttttatgacaagaagacagcaattcacaaagccctctgtgacaatgttgacacccgcacygtcatggaagagatgcgggccttggtcagtcagtgcaacctctatatggcagcccggaaagccgtgaggaagaggcccaaccaggctctgctggagaayatmgccctgtacctcacccatatgctgaaggtaagccaggccccaggcaggcgtatccctcagcctgtgtggacayaggagccaggccccaggactgggagaacagaggcctctggtgccccccagtgctgtgcctggtgcccagcacctctgagacgtggagatatgcttctgtcctctttggttcctggtgtgcttttcacgcgttagaaataacacccataagcggagcacagtggctcacatctataatccaacactgtgggaggccaggtgagtgtatcacctgagcccaggagttcaaaaccagcctggacaacatagtgagatcccgggtctataaaatatattaaaaattagccaggtgtggtggcacacacctgttttccagctgcttgggaggctgaggtgaggggctcgcttgagcccaggaggttgaatagtgaggtgtgattgcactactgcactccactctgggcaatagaggggagaccctgtctcaaaaccagacaaaaataagtaacatccatatagttgtccttactcagagctatttctttcctttgactccgtttccctctactcccatcttggagtttgaaaagcaaaaccacgccaggcgckgtggctcacrcctgtaatcccagcactttgggaggccaaggcgggcggatcacaaggtcaggagatggagaccatcctgactaacacggtgaaaccccgtctctactaaaaaaaatacaaaaaactagccaggcatggtggcgggttcctgtagttccagctactcgggaggctgaggcaggagaatggcatgaacccaggaggcrgagcttgcagtgagccaagattgcgccattgcactccagcctgggcgacagartgagattccatctcaaaaaaaaaaaaaaaagagaagcaaaaccagggacaaggcctcctctctgaacacatcctgtgcagagcccttccccgcagtgcaccttgaaaggccagcagggcctggactcaactcccctcccctctcctcctctttccttgttgttgggctccagtggcttctggctgaaacagagctggagagggtagctgtgagtcagggccatcctggagcaatgagggcaccctcaggctcgggtttctggggctcctggagctgctgcttccatctctttcctggtcttggggcaccccctcccgtgaacgaggaacacagctcacagctgctcgccacatgccgccttcatcttgccgcagcttcaggtcccatctgtttcttttcctagatctttggggccgtagaagaggacagctccctgggattcccggtcggagggcctggaaccagcctcagtgtgagtagcatgcagggtcctgccttctgcacctgctccctccccactccctacccctctgtgtccctctgaactgcmcctcctctgtctgcccacccacaccagacccttccggacagcgcctcgagctaaatggcaattctggctctgagagtgctaagtgtggtcagctgccctgccggtgtggagggtctgctttggttgtgactgttggtttggggcactttgccattgtgctgtcccatgagcttggtcttggaccccaactacataggccgctgcttatttgcattttgctgcggccacttggcatcatgaacacacatgacttcatcacatatactgacctgtattcagtaaatgcttcatcgaaaggctgcagagctcacaaacagcayagaatttacactgatggggagatacgccactgtctgcctcggtccccatggggctgggcagatgccctaacaggcccagtcctgaccctgagcccaggtcggtccacatggcctgagccaggaccccctgccccagagctgtggcccacaggtcagggggaggtcatcctgtagagccccctgtctagtgggtctgtgcggtgagaaaatccatccagaacaccctggcagtctgttgctggcttctgtttgcagttggcatgtgagcagacacacactgtcagtcctrtccttctgctgtagaacccctgtcccgtctgacacacccacagtcaggcttcttaaagatggacttccacctgctcccaggtcaagaatgctctttgactattcgattagaatgcagatctaaatatttaaatagaacaactgtaattttaattaaaacaggagcttaatacaaagtcaaaatgcaaaacctttttaaaatcctgtttcctaatgacaagtggtgtgaagagcccccatgcggatggagcttacagatgctcccccaggaaccaacttgcaaagagaaaacagtccgtgttgtaagaagtcctgccagagcacctagcccatgtgcctggtgccttttgccagccttagcgctagctagcttggttgtggtagttggtgtggtatttttgagacttcctgatatgaaccttctttggtgcttttaagaaaacccacatagcttctttgttctcttgcgcaaatgatactaagatatttattttctttaaaaacaaaaaaccaaaacacacctcctgggttaaagtcagcctgcctttgaactgcagtgtttttcatcttaacggctgctgtggttgtgggggtgccttcagcgtgctgtggacacgcatccgcatcccccaggcagcctcatttggcctttgcagtcagctgattgcgaagaagcagctgcggcgaatggtgagcctgctgacaaaacgtcctgtgcccacacatcatggccatttgacgttcatggattaacttccaaatccaaatggttttaggagcaagggaggcagttcctccatcttgtaccacctcagtgtcgccacacagccacctgctagcatgctcaggtgggggttgcagccccaggcgttcttgagacacacccctgcagccattctgagagttcccctccagtgcccctagggctggaactgagcctagcagtggggtgaatgcctccctttctgtccttccccaaggcttgtctgggctggctgtgtggtgggtggagatacagatsgaaaacccccaagaagtccaaagttcagatgcagaattgggtctcagggagcttggcttagacttaagggcttgctagcctgcctgacttttgcacttgctaaatttgtgtgtttctgtttttgagacagagtctcactctgtcgcccatgccagtccctgccctgtgtcgtggccgctgagctattattcagttatggatataggagtgtgagcagctctcagcgaacaaaagctcttctttccacagctggagtgcagtagcgcaatctccggtcactgcaccctctgcctcccgagttcaagtgattctcctgcctcagcctcctgagtagctgggactacaggcatgcaccaccatgcccggctaatttttttttgtattttagtagagacgggggtttcactatgttggccaggctagtcttgaactcctgacctcatgatccacccacttcgccctcccaaagtgctgggattacagttgtgagtcaccgcgcccagccagcacttgctaatgtttttattttggttactgagctgctgaatcagctaaggggcagggagcaaccttgctcaaaagcctaaaacctttcctgtcctattagaaaaagagaaatgctagcacagcatggtggctcacgcctgtaatcccagcactttgggaggctgaggtgggtgaatcacctgaggtcgggagttcgagaccagcctgaccaacatggagaaaccctgtctctactaaaaatacaaaattagctgggcgtagtggcgcatgcctgtaatcccagctacgcgggaggctgaggcaggagaatcgcttgaacctggaaggtggaggttgcggtgagccgagatcgccattgcatgccagtctgggcaatgagagcaaaactccatctcaaaaaaaaaaaggggaaatgctttgggaggccaaggcgggcagatcacaaggttaggagattgagaccatcctggccaacaaggtgaaacctcatctctactgaaaatacaaaaattagccaggcgtggtggcgcttgcctgtaatcccagctactcgggaggctgaggcaggtgaatcgcttgaacctgggaggctgaggttgcagtgagccgagatcacaccattgcactccagcctggcaacagagcaagattccgtcttaaaaaaaaaaaaaaaaaaaaaaaagggaaatatagtagaaargtttttctatcctgtggccacctccccagtgttactgtgggtggtgaatctacgtgtagctgctaatgtgcatgtagatagtaggtgcttaatggagatcattcatcttaaacaagtgtatgtgtgaccacagatcagacgaaagcacggcccgggagccgccagcctcagcataggtaaggccccagcctggggagtgatgtccttgggctccttaggaaatagtccctcccagagctggcccctctgaaaccataaagacaagctgtttcacagcagcgtgtctgacctgaggaaagcagggcctgtcagcagctgggcagagcggcggcagacccacctgctgcagtagaaaggaagctcacttcatgctctctggcytgagagtctgtgtgactcgcacacctagcagggactgtgtgtcagggacgagagcgtccaggctctgggatgcyggtcacagctgtagtgtgcacagcagcactgcccatgccagtccctgmcctgtgtcgcggccactgagctattattctgttatgaatatgggagtgtgagcagctctcagtgaaccaaaactgttctttccgcagctcgaggccacagtcatgccctaccttcaggtgttatcagaattccgagaaggagtgcggaagattgcccgagagcaaaaaggtgaggaccagttgctggaaagagtgtgggagccactcccctcactgggctccccggaccgggcgtctcccccgaggcactatggcgttcaggccggatcatcctctgggaaggctgccccgtgcaccacakggtgttgaacggcatccygggcctggacccaccaggtgcattagtaccacacgctccagtcaccacagccccacatgtccctgcagggcagaatcctcgastgagtgcagctgagtgggcagtggggaccgaggatgtgatatgatgggccagggttgatttgcctctccttctctgagccraggcagaatggtgggtcctctgaccagcccagtcaccacctgccatttggctcacactggggcttatttttgttcctggtgacctggtaggctgggtgcgctgaggtgtggctcgttcctgctgccgagtggagccgagctgcagcttccagggttcccttttctgctcaggcatgccagatgaatgcttgaacttggggttcacacagtggcccctcactgtccataagcagccattccttcatctttttgtttgtttgtttgtttgagatggagtctcactctgtctcccaggctggagtgcagtggcgcgatctcggctcactgcaagctccgcctcccgggttcacgccattcytctgcctcagcctcctgagtagctgggactacaggcgccygccaccgcgcccggctaattttttgtatttttttttttttagcagagatggggtttcaccgtgttggccaggatggtctcgatctcctgacctcgtgatccacccgcctcggcctcccaaagtgctgggagtacaggcgtgagccaccgcgcctggccattccttcatcttttgaaatttctgagatgtgtgtggtttaagacttagaaagtgctgaatctgagcattcgttttgactgccagttttaagaaagtgttaaacacagcaaaaagcagcatcaggcaggcctttgcttcttcctgtgagtggttctgaattggtgagtaacagcacagctgggaacacacactgaggacttaggatgtgctgggccctgcccactgctttctgcacattgcctcatttaccaccatgatcctccaaaagaggaaaggagagccctggccgggtcacactgacctcgagtgctactccatcacctgctgtgctaattctccctccccagggggcctctgtgtggtgggaagtctgacctaggatccacctggtccccatctgtgcagagcccattatggagggtcacagtggggcagcatccaggcagggcatgctgaagacagagcagacagagacccagcaagcctctaggagaagctgcaccttgaggaaggatcaggaagcctgggtgggtggaggggccgagaggcggaggagccgaatctgggcctgtttcgggcaggggacagtggagcaggaggcaggagggcaggaaagagtttcgggagctcggggctccacaggctgcaggagagtgcaggacactgggtgagaggagaggctggccgggctgctgggctgctgggctgccacaagtgctctggagaggggcctgggcctgactgagcccctaacaggcagcggtgggcgcacttgccctgaccacataagcaccatcgcccctttccaacacctgatgccctcagcatttcaaagcactggaatcaaactgaaccaagcctggaccagcctattcaggaccagcgcagggctctccagcaatcttggcagcactaacttagcggcatcgctggggtcgtgggcttgggaagaccattcctggaggtcgcctgggcatttccacctgccttctgggggacatcgaaggccgagcccgggccccagctccctggggtcatacaagactgtgcacgtggccttggcttccctggcatgccacagccccgggagggcgctaaagggggactggccaggcacaagctcccgctcggtggcactgaccaggacaggacttgctcaggcctggagagtggcaccagccagccagcattggaagtagttcggttttgctttctgtttgcttttcacttttgttttgtggcttggagcaggtagatgggtgatgtggccccaggttaagatggtggtgatccctaccctgtacatcatcccatatgtgccttgtgagccagagaccctggggatccaggggcctcagaccttccgacggggcagcgtgttagaggtggctctggtgcaatcaccctgtctccccagcagcagcaaatagtgactgttttgttattcactgttaacatctcatggctggccaaagagaaagtgagtgtataacaagctcaggggtggccctcagatcagctgggatctgcttggcccaggccagatgctccacagacagaygaaaaagaaactgtttcccctggaaatacccccatggtccagtcagctagagagcacaggcctggcaaggagggcaatgggttcagggtttgaccaggagagaggcactgaagtgagaaagccaggggctgggccagggccctctgcactggggagatgatgccatttccccatcgccacggttttgttttcattatgttaaaatacacagctcagtgccattagggacatttacagtgttgtgcagccgccaccgtccatctccagaactcttcccttttcccaaactggaactctgtccccatggaacagcaactccacatcccctccctcagcccctggtgctcaccctctacttctgtctctttggattttactactccagggaccctacatgagtggagtcacacagtgtttgtcctgtgtctggcttatttcgctgatcacggtgtcctcaggtctatccaygytgcagcctgtgtcaggacctcctgcctttttaatggccaaatcatattccatggatggatgggccctgatctgtctattcttccatggaagaattctcatcacctttgcgttatctttgtagcccacatttctcttcagtaaatccctgatgatgatgtcattgtctgctcctctgccccagctctgctaacagaagccacagaggcttcttcctcagctcctcagaatccagacccagaggtcggtgtgggcctgaggggtacggcgtgtgtccctttcccccagggagtgtggcccgggaggctttcttggtgcctgctctgatgatcacccatggcgggtgggctggggtgctggccttgtggcctcccatsacacccgtgacagtgaccacaggtgctggcttgccttccttctaatgagggtgctatccaggggtggctttcaaagagtgaagggcaggcacctacctcagctcatgccccagtcagctgctcctcaggtggctgaggagggcctgttcccaggaatgatactgcagacaaatataaaggccattgttcccctaggtctctgcctggggaggttgaaactccggaagctgcccaaagtggctgtgcttatgagcgcggccttgaagcccaaggatatgcaattttttttttttttttttgagatggagtcttgccctgtcgctaggctggagtgcagtggtgtcatcttggcccactgcaacctccgactccctggttcaagcgattcttctgcctcagcgtcccaagtagctgggattacaggcacayrccaccacacccagatagtttttgtatttttagtagagatggggtttcaccatgttggccaggatggtctcgatctcctgaccttgtgatccacccgcctcagcctccaaaagtgctgggattacagtcatgagccaccgtgcctgcccggatatgtgaatattttatctagcagtgaatgaaggtgtggggtgcccagcaaggagctctaggggtctcagttatgaggacacagcaggaaaaggacagacgagaatggcagcatgtgcatggtcagtgctgcccaaaggcagggcaggcaggaggatggggtgggatggtgggggtcccagcaggctggggggcagggcacctgcccgcctagcacagttgggcgcagcaagctgaggggccagaagaaaactaaagggtgtggtgattccagcaaacccaaggtcagatttcagagcagaaagttgtcacttggagagcagcaagcatctgtcctgttgatgtagtctaggagatgctgtcacatcacctgatactctggagtctttctgagataggttggcatcccatttaccctgtaacacccaaaacttcttatgtcctgttctctacctgggcgttgtgcgtgggctgggaatgggaaaactcgggcagagcagagacacagagggggcgcctgctagagactgcgtgaggagcccactaggagaaccgtgggatgccgggcaagtctgcactgctgcgctctgaagtcagccacagacacatgggtttccaagcgaagctccctccccatgtgatggaggtcacagtcgccctccctgtcatgcctcctttcaccctcccagctgggtcaggtccccagtcagaggcagaggtgagcacagtcttgggaagcaacctgcggtccacccccaccgctcagccccgcctttacagctgcgtgcgcttcagccctgggagggctgattctcacagagctcgagctccttggtggtcctgggactcagctctcctgggtgccggtcaggacccccatcgcagtcccgtgtgcatttgggaaccaagtccttggggcttgagtgtaaatggtccttctgtaagaaagctgattctggcaccaacagagaggctgcctcagatgaagagtgttagcacccgaagggacccccaggcctgtcctgaccctcccacccctgctgtcggcccaacttgtgtccctttcctggaagaactgcttccggcggccagtgtgctatgcttcctcctggctctgccctgcacccccagaacagcccctgggcttacgggagacactagtctctgggcttctgcagccaatcaagctgctgggccctccctcccaagcactggaggaggtactcgttctgtgggccggggcccctccctcctgagcactggaggaggcacttgttctgtgggccacggcccctccctccccagcactggaggaggcactggttgtgtgggccctggctcctccatgtctgagggaactgctctgcttctcctacagtccctgagattctgcagctcagcgatgccctgcgggacaacatcctgccygagcttggggtgcggtttgaagaccacgaaggtgggtgagcccttgctgtttgctacaaagttaccaggagcttggagaggtgtcacaaggagagctcccggggctgggctgaggctcatgcttcatgattgctgatgcagaatcccaaagtggcagccccatgggtcccccggcgccattcccacgctggccagcctggcaggggcaggggagcaccccgtagctccttcccactgctgcgtgtggtggygtcacctcccctgcgcatcatctcccctaggggcctggctgcccgctgcccctgttgctaccgcctttgaagctctcagctgaggaaccagcctgtatcctgtacactgtcaacagattgcatgcttgttctcccacttcgtggaggtctttttgttccacagaaagttaatttttttgttttttattttcaatttttatttatttgtttattgagacagagtttcgctctgtcgcccaggccggagtacagtggcgcgatctcggctcattgcaacctctgcctcccgggttcaagcgattctcctgcctcagcctcccgagtagctgggattacagacgcccatcaccacgctcggctaatttttgtatctttagtagagacggggtttcactgtgttgacmaggctagtgtcgaactcctgacctcaagtaatctgcccacctcggcctcctaaagtggcatgagccacatgcccagccttagtttcagtttttatggatacataatagttgtacatatttatgggctatgtgtgatatttggatacatgcgtatgaggtactatgatcaaatctaggtaactgagatgtccatcacctcaagcatttatcatttctttgtgttacgaaccctccaattccactcttccactctgcccctggtaattttaaatctcagatgtcatgtcctattttcctactcctggctggcaagaccttcctaccttctcgttacaaaatgttctcgccaggtgtggtggctcatacctgtatcctagcactttgggaggctgaggtgggtggattacctgagctcaggagttcgagaccagcctaggcaacatggtgaaaccccgtctccactaaaatacaaaacattagctgggtgtgggctccttgggcagctgagacacgagaattgcttgaacccgataggcaaaggttgcagtgagctgagatcgtgccactgcactccagcctggatgacagagcaagactctgtctcaaaaaaaaaaaaaaaaaatcacacacacacaaaccaaaatgttctcctgtgcttcactgctgctatggaggtttttgtttgtttttctcctgtgggccctcgctctgactgggcagcaccgcatggtctgggcagggcagggcagggcagggctggccccgcagtggggacggcccacagagcccagcctcttctcacacgcagtttattttgcaggactgcccacagtggtgaaactggtagacagaaacaccttattaaaagagagagaagaaaagagacgggtgagtaaagtgaaaatgacttaagygtgatatttgttgaaaatgtaaaaaccattgcgattattacatagtttactttttaagcattgatgtttacacttttattaaaatcccagtatttataaatgtcagaaagaaaaattaactagtatcttctaatgaaggacctcttttaaaaagattattccctcagtttaagtgaaaaccagtcacttttggcaaactgtgaagctgactttttttttttttttttttttgagacggagtctcactctgttgctcagactggagtgcagtggcacgatcttggctcactgcaacctccacttccctggttcaagggattctcctgcctcagcctcccaagtagctgggactacaggcacgcaccactgtgcccagctaatttttgtatttttttagtagagatggggtttcaccatgttggtcaggctggtctcaatctcctgacctcgtgatccacccaccttggcctcccaaagtgctgggattacaggcttgagccaccacgcctggcccgaagctgacatgttaagatcccagtcccaccgtgccctcacctgggtggcgcgtgtcactgatgcatctccacctcctattcccagcatactccccacctgcaccccacaacgcccccaggatcagggatggcccaagttcctcggtgcccaataggacagaagaacaggaacaaaaacgcaatgtcagaatctctgggcacagcgcatggggtaccctgggatgcaggcagcaggatgagaggcacctgggcccccagtgcacaccatgggaggtgggccatgggggctgttgccaccagcaggtgggtccccaagaggcttaaagcaggagaccaccgtggagggcgagtttggatgccacagctctcaggaaggaggctctgggaggaactgaggaaggagaatcgacagggtggttgattgatagatgggatgtacaaggtcagggaaggcatctatgcctagccctgcactggcccaaggcacgaggggagagctcatgccagatccaagtgtgggtggctggagtttgcagtgctttggaggaataacgaactggaactctggggaaagctctagacagtggtgagtggtctgcaggtccatcctggttggcaggttgggaagagctgggcttgccctgtgaggttggctggtgtgactgcctcatcagggcccctccccattccatcacagtcactcacctagccttgggtctcgcctgccgtgctgtgctgtgaggtggcctggtgctggctgtgcagacgccctggcttgctgcactccctggcagagtgctcagaagcaggaaacagacaagaggagcgccagggtggcccggccagagcctcacaggccttgcactctttgtgctggcctttccactggccaccttggctgtggcctgtgacttctagtagctcctgtttcccaaccaagggactcttacctcaccaagctgctgcaagaaggcatccccaggcccgaggcaccatgggggaggggtcctgcctctccctgtaccattcccaccagcacataaacacatactaacttttaaagggaaaaagcagaaatcctgagcactgtgtctctggttcctccaagctcagtgcccagctcctcccccacctcagcccctttccctcggccagccctgctctccctccatctatctcgaaagagctcgatcctgttggccccagccccatcctgagtctctgagacctttgtgccttcctggtttcttttccctagctctgtgtgtggcgcctccccaggagaccttatctggtcctgcggcttctccaccatctatcttgtasccggtggcccaaaaacagtttgcccagctgcctacctgatagctccactgggccaggaagcctctgatatctaggctgtccaaagtaaatgtgattttcaactycccaaacttgttcctccttcctgccatggagggcgtgcctacctgatagctccactgggctgggaagcatctgaaacctaggctgtccaaaggaaaggtgaaaatgtgattttcaactccccaaacttgctccttttccgtcagtggagggcatgtctgttygtgcaatggctcaggccagaacctcaaagcaaccgagggcttccctcaccggcacccagcctgctggctccactaataagctctccctgcagcatcagactgtcctcgcccctgcccgggtgctgcctgctggttggagtgggctctggtctcctcacctagcccccaaggctgccctccgcccaccatccccatcctgccctggcgctcttgctccttcccaggtaccccaagacccactcaggataaccctcacagtgctgtcctggtcattgccttacagatcctctctccttgggccaggctcaccatgctggtccctttcttcatgttagtggtgcctggatcttttagcattggttctgtttgtctgcctgctgcatacctttgcatctagggcagggccaggcacccaggggtgccgctgaggatccccaaagggaatggaagagggtcggtgtgctgcccggcacatgggcttgtctccccacagtggggagggcctggtcagagttcagccctccatgccaggccctaggagaggggcttgtttggctagacctctcactccgagagacccagcagcctgaggcagccctgtctcatctggctctgtattgaccctccaggttgaagaggagaagaggaagaagaaagaggaggcggcccggaggaaacaggaacaagaagtaatgcattttgtttgggggtgagggctctactgggcaggagtgcaccctgaccccatgccctgtggctctctgtgcctccgtggaccttagccaggcccctgcagaccctcacagaaggagctccgctttctgcctccaccacccaaggcctgccaggcccttctcacatggggtgcagggaaggcctggccaaggggaaggctgtgccatgtggtcacaagctccaagacagcgtttatagacttactactattaggttttctagtaagctttccactattcctgtagaaataacatctggtttaattttaaattccttgtatgttccctccaccttggctttccccttcccatctttcatagcactctgaatctgagggcttggaagcaagttgagggctggaggtatgagcagatgtcgttcacagtgcggagccccaggtgctgctcgggggcagtgactgtgccgtgttgcgtgttctaggcagcaaagctggccaagatgaagattccccccagtgagatgttcttgtcagaaaccgacaaatactccaagtttgatgaaaatgtaagcatgtaagcatccttctcttctattcagaacttgatcagaccacattaaagtgggaggacaggaattttcaaccttggacaagcagattttctgtctgtagaaaatttggaatcaaatctgrcacccgctttaggtccagggcctcctggcccaactactgagctccttccacagcccaggcagctaggcaagcccgtgccagggccccctccactggtgtggtgagctctggtccctagccctgggagttgtggccccgggccaagatccacccaggccctcacaagctggctgaagtgccgtggcgcagataggcctcctacccccagtttcttcctttgtcatagcgattcacagccactgcctccaaacctctaggcccctccctgctggcatttggatgtgtttgctatgtacctttgggccagctgtgtcagaactcagccatgggtaggctctgaggggcacagtgcccctcaccttaggcaggaagcacccccagactctggtcgcccctctcccattcttagctgctggagccagcactgccagatgagtgtgctgkctccagagcagtgtggtgactgaatgtccaagcaagaggacatggctgcatcagggagatagacactttgagacgggagggcaaagaaaggggagttggggttacccaggtgcagaggagaccaatagccgctgtgctctgggttttcagggtctgcccacacatgacatggagggcaaagagctcagcaaagggcaagccaagaagctgaagaagctcttcgaggctcaggagaagctctacaaggaatatctgcagatggcccagaatggaagcttccagtgagggggcacaggactgactttttaaaccattgtggactagtggctgctgtctgcctcagtgacaatgtcccagcgctcctatcatgtttacagtcacccttgggtcctaaattaagagttgtgttcatgtaggttcgtgtcgtcgttggctctgagacattgataataaatttttctcaacagtgagaccctctctgtcttgttctgcatgttcagcacttggyaggaggcctggtggccagccagggccgcttggtcagcaggtcacaacttaggtgcttgggtcagttgagctgcttcagctggccgaggaatttctcccccatgctgatggctatcggctaatctctggtgtgtgggcacattgggaggtatttgagtaggaaaaagacaggctcagactggcagagcctgctgagccctagacaaaggccgctcagtctgccctcgggttctgatgaataaacacactgcaggttttcctagagccgttccatactgggcagcagcacagcgagtggctcagcaggcaggcccctggcgagctgcccagaactgccgctggagacagcaagtccaggatctgcatggctaatgagtgagttgtgggggtggtctcaacacagcaggggccttcttgtccccagtgcccagtgttgtccttgccaccctgcctccacacctggttcacctggactaagaatcaccacccagacgcgaaggtgcttacccatccttggctgaggagggcgtaagcagaaaccacagcctgcttcatgcctgcggaagctggtgccaggccatatccatcgggacaaaagacagtcattggtgctgtggacatccagggggggacactccatccagtgcatgtggatggtggcagcagcctcagcatggggagtgtggcagtgttgggttgtgggtgcgccaattctttgtccttgccctctgcatgcgcatgctgtttactgcagtagtgtgtgacacagcaaaaggctggaaccagcctgtctgtgcatcagcagggtgcttggcacagcttgagagcacccacccaattatgcagggagcactaaggttataaatcaatgaggacagtctctgggtattgataggcctgactttgaaccttgtcagtattttatatataaaaaaatttaaaccagcaagaaagaaaagtcccccaaacaaagtaaaacaaacatgttccagttatctgttgccacttaacaaatcaccccaaaacttcatggctgaaaacaacaatgatcatgttaataactcatggctctggattgactgggctcagttgattggttttcagttgcaggcagatggggtcatctctaagtttgtgcctgggtcccacactagggctgcttgggcaccttttacctctgtgagacctgtgtgtgatctctccagcttggcggcttcacggtggctgatttctgttgcaacagcctatagctccaaaggtgcgagtcctgagagagagagagacaggagctatatggccttttaggatctaacctcggaggtcatgtcctgacttccactgtcctccctagcggaggccgtcacaaggcccacccacgttcrtgcggagggggaggcatagacactaccctgtggtgggcattactgggttccagaagggatgggaaatactactgcagctatttcagaaagtaccatctggcacaaaaacataaatcaaattggcaacctcaagaaaagaacttcaactttctgagaattagccattttttgctacacatctttaatggggtatcttctaaggtcaaagaaagtacagaaaagtcaattcaatagttttgttgttagtaataacattggcattataattttcaaaccctgtatgccaacacaaataagatcactgacacccaggctggagtgcagggaagcaatcttagctcactgcaacctccgcctcccgggttcaagctattcttctgcctcagcctcccaagtagttgggatcacagacacgcgccaccatgcccagctaatttttgtatttttagtagagatggggtttcaccatattggccaggctggtcttgaactcctgacctcaagtgatccgcccgcctcagcctcccaaagtgctgggattacaggtgtgagccactgcgcccagcctagcaatcaagtttttaatgtaagacgataaaatatcaaagaagtcaaggaaaatcactttactattaaatacgaattagaaaaaacaatatgaagtaacttgtgattttaaaaagtagattgtttcctgactgtgtagatgggaagggtggagaagcaaggcagccctggtggcactgagcagccccagccccgatctggggctctaaaccccatcccaccccctggagaaatggccagttccaggtctgcagcagcaggagtagctgagcccaggcactcttgtgccccaaaaggggagctttcgaacaccaagaagtcaggtcaggaggacactggacaaggtagtgacacatagcagctgggtggtatgtgtcaggggcattctgctgggtttggaaaagccacccctgaaaggttgcatgccatgtgattccacgtagataacattctcaagtaggaatagagaacagatggtggtagctggggttaaagatggtgggggggggggcaggtggaggggagtgactgcacagggacagtaggaggtggggttggtggggagggcacttctgtgttcttgtttccatggtgatcacacaaatctgcatatgtgatagcacaacgtagagtcacacacattgtaccaatgtcagtctcctgtgttgatcttgaactctggccaggcaaggtgtgaccatcaggaaacaaactgtgcagttttctggaaacctataattactttaaggcttcaggagctcctactggctaagtttgggacaatttgagcattgaaaagaatgattccagccagggcaacatagcgagaccctgtctctactaaaagtcaaaaaaattagccggtgtagtggcgcacttgtgatcccagctactcaggaggctgaggttgaaggattgcctgagcatgggaggtggaggctgcaagtgagctgcaatcataccactgcactccagtctggatggcagagcaagactctgtctcaaaacaaaaaacaaaaacaaacaaacaaacaaaaaaaaaccccaggcatctgtatttattctcaaaactagagaaagctaaaacatattgtcgttactggaggtggcctgtgtcagctcctttctgtagagttactcattagtgacagaagcaagtattttaccttgcatgggaagtatatttcagggccaccaaatggccctagctgaaaggggaaagttgttctttcccccaaagatgccagctaagggaagaagcaccaggatcagacatctccattctgcaaccccgaatgaagtcattgattcaggcaggggctgaccgcggatgctgagacccctggatgaaagctggtaggtgctggataatttgatgccaaagtgtcaccttgtgagtaacttgtaggtttccaggaggggatacgtgttactttctgatgttgggccctggctgtcagccccccaacaaaaagaaggatttcctctaaaagtataagtcagtattgaatgcagcttttaggctagggctccttaaccttgaatgtgcgtataaactgcccagggttgcttgttaacacaaatttcagttcaggtctaggaggagcccaagattctgcattcctgcagtctcccagctgtggcctgtgctgccgggctacagccccctcaggagcaaggctgtccagctcacttcctgtctgcaggaaatactgggaacagagggagaatgcaggtgaggccatgaagcagccaccacatttgtgcagaaggtggggcattctgccagatgcccggctggcatcttcaatacgtctgcgtcaaagggagcagaatagggcagaagagaaggactgggagagactcgagaaacaaaaccaccaggtttgagggataatctttgaaggatttgaacaaacctgctgtaaagacatttcaaagggggtcgggcacagtggctcatgcctgtaatcccagcactttgggaggctgaggcaggcggatcacctgaggtggagagttcaagactagcttgaccaacatggagaaaccctgtctctactaaaaatacaaaaaaattagttgggcatggtggcacatgccagctactccggaggctgaggcgggagaatcgctcgaacccgggaggtggaggttgcggtgagccgagatcgcgccattgcactccagcctgggcaacaagagcgaaactccgtctcaaaaaaaaaaaaaaaaaaaaatttcaagaaatttgaatgaccaggtattggatgacagtcaagatttttgctaattttgttagtgtgataatggcggctgcatggagaggtgtctttaatgagatacaaagtagcctgaaacctgtaactcagtatcctttagccaaggaaactgatgaagtgcagccggcactgcagcagcagcaatcccttccacagtgtatcctctttactggcctgtgctggaaaccatgtatcaaatatcctgacaactgggccatgaggaaatacccttgtctttagctgccaccactggggtgagcggaggttggcccaaagccgcggtgccatccaaggaggcaagaaggagtggcgtgtgccccatttccagtggtggctgcacaaaaacgtatccagattgccaggggcacgcctggtccccacagctggtgaaggcctggctccacctggactgcagtagggccaggctgtggcccctgtttcacgccccccaattcagagtgattctgggccgcttttctgcctggagtttccccgttctgagggcccactgcctggtgcgccttctctctgcccttccctgacttcctccagtctccccaggctgggtccgagggcctgcagtgacaataggctggctgggcccaggccattggcttggcccccaagaggaccccagcacctccctaccctgcaatctcttgctgtcaggctgcagcagatccttctggaacaacgtggggtggacacttttcttgtataatattagtttgcctgtggaaagtgtttcttttctgtacatgaaagctctgttcagctgtaagagccagatttacatcttcctgtttttccccaaagagcaatctttggtgtctttactataaaaacgtcatgtattcattatttaaaaataaataatacggaaaacttccaatataaagtagaaactgaaagaccccgtgccctacctctcaaatccctacaacatttggggtacagtcttccagatgccttctttctgaggccgggaagcttgcaaaggcactccctgtctgcgcacccctcttgtgtggagtacgccatgggtgttttctgttctccatataccaggagaaaccagccacctctcttggatgtctccagggccccactttgttaatgccccacaggctgagcccccagcctactgagggggctttgggcatttctgaggcctcggctccagctcttggcggctgcgaggtcttttgaggagtagcgcccccaccacaggtgaagggcatggccgccccctccagggccagagccacttagctgggggcgttagaggggtttctctgttttctcctctgttgaatggggcagtgattgctgcctctacttccaggccaaggtgtagccattgtcagtagcgcccaggtaagggcacagctcgccaagtgccaggcacttttccgggtgctggcaatgtgaagaagaarcacgtggtgtctgtccgggactgtctcccggagcctcagtgaggacaaggcagccaagagcagaactacaggcaaggtagcctctggaggggactcctgatctccaggttggaggaggctgaggcagcagaggggttgtagacaggtgggctcatgcctgaggcctggcagaggcagcgctgggaaaacaggaatgaaactcaccaagcgccagctaccctgggagtcctgatcccagtggccctcagctctggctgcatgtcagtgtcatctggggacttctttgttttgacacagggtct

SEQ ID NO: 93514 - DNA, 12708 bp, Homo sapiens
aagctatatttctttgccttttcaaactgtgctttcttgaaaaaaaaaactccacttctgagaggttagccctaatatggtacatcaaagtctgtgcctttagaatacctgtaacagccacaaaagagacttaatagataatgtgaaagggggagctattactcccctttaagatacaaaagcatttctaggtagtagggaagatacaattcaaaacacatgtgttatgcatctcctctaatatgagaaaactaacatgaatcagcataagagaacctagcctgcaacaattatgacaagaaaaaaaaatctctaatgaattctcatggtaactcctttaccaaaattatacaagacagcaacaactaaaactaaaacaaaaccgaaaatgtgttggatcaagtaaaaacttatctgttgcagaaattactgtagcatgcaacctctgtatattttcagagtgaattccaaaacatttaaaggaaaatggtaagtgatgagtggcacaaacacaaaattcattgggtcattgatgatattctagtctgagtgaaatacacctaggctttagttcaatttttcaatccagaaaatgtatttagtgacactgtgtttggtgctacatattaaaaatgcttttaaaaataaaaataatagcttaatctataagtgcagagatgtaagaatcccaaacatgtgtatgtttgtgtttttgtggtgtgtgttctgcgtgtctctgtgtgtgtgtgtctttgtgtgagaagattgcggagatgtaagaatcccaaacatgtgtatgtttgtgtttttgtggtgtgtgttctgcgtgtctctgtgtgtgtgtgtctttgtgtgagaagattgcagagatgtaagaatcccaaacatgtgtatgtttgtgtttttgtggtgtgtgttctgtgtgtctctgtgtgtgtgtgtgtctttgtgtgagaagattgttgggaagaatctccttaaacttttgacaatagcacgttttcttagaattcagtaagttaattcttgttttactttactagagataattcttaaagactatttcagacacacacataagggtggctgtacaccaaattatgaactcttggaaaagaaacaaaagtgtggtataaattttccccaagctgagatcaatattctgcaaagaagtaataataatgaacggaaaatataggaggtgttttctcacttactgcaaatatgaccttggacaaactacatatctttttttccattttttcatcgtaaatctcatgtatcctttaaaaaggattaaataaaaattacataaaaatactttagggaaggtgtttagaaaaaggcccagcacatgattagtgctaatcacacgttagcttttactatttccagaactattattagttttgatattactattgttgttagttaactcatattaggcttaccaaatgtaaatgtcccataatcacttactaccattcattgttaccaagtattatcttttttacctacgtatctgtgagtttgttgttgttgttgttgttgttgttgttgttgttgtttgagacggagtctcgctctgtcgcccaggctgtagtgcagtggcgcgatctcggcgcactgcaagctccgcctcccgggtttgcgccattctcctgcctcaggctcccgagtagctgggactacaggcgcccaccaccacgcccggctaatgttttgtatttttagtagagacgggatttcaccatgttagccaggatggtctcgatatcctgacctcgtgatccgcccacctcggcctcccaaagtgctgggattacaggcatgagccaccgcgccccgtctatctgagttttttttgaaggaaagcccattttcttaacgtatcttctgaacaaaataattaagagcaaggactgtggagtcagactgtccagcttgataatttgattatattttatttattagaatattttagtgtgtactttcgttgaggttttctcattaatattttattccagttcttccctgggtttctctggaagaaattatacttacatttgaaataataattacattaaggtttctttagaaaatatgcattgacttgccaaagactcgaaaagcatattgttgttcagtataaccataagtggaatacgttgagttattttttaaaaataatgtgcagataaaaggacatagtgtaattaagagaaaattatttttatagcactttggactacattataattgaatattctaatagtgccaggagttatggacactgaaattaaaataaataagccaatacaaaactatgcacacattgattgaagattcttcctcatctaccctgggggcatcatttgcagagtgaatagagccaaagtcttcattagtattaatatcagaatacaacatgtctttcatttgaacagagaaaaataaatctcagttgtaagcctattttatgaaccctattgagagtaggccagggggagcatgtccacacagagtatactggtttgttgaaaggaaacattggacatgtctctaacttcaaaaataattggaatacaggtgtcctatcatcaacaatatagtgcagaacagggttgatgccgtgtagtaattgatattaactgcagagattagtaaataagagttacagcaggacattctatttgatgtgcatgtccattgttgcagttcccatttcaacacttttgaagggtcctgtaagagcttaatacagataatttctattaattggcaaatttattactttctggcttttttccattatccttttattgtgtttctcagtctctatcttttaatacaacttccagttatctgttaaagtgaattaaaattattacaaagaagccaccacttcatatttattgaagtgatcacaggcaaggtgtcactcaaattctcctattgtatatcattgttcaagcattgcatgcaacaggtatggtaacgtcactgcctttattcacggttgtcaagaaaaatttcatcagacaatgttaaacaggcaattattattttattcaagactattgcaatggggagagaggcaataattcagtctgaacttacctcttctgtaacaaagaatggtagggtttttaagagttgtggtgagttagtggaaaagtaacaaaggatgttgcagggagattgatcaatggggtgtgtcaagtacattaagttatatattaagtttgtgattagggcctcttgcttggaatgttttgctctgtgattgtgtaacctgggttctgtaagggatagggggaaggaaggtcaggatcctctgtggttagcccacctggtccagagtgagagggaggtcagttacctagagacaaaaagaagcctgtataaagttcagacaagctaaggggaattttaaggccatcttgttcaatgccatttaccctaagccaccctcagagaaagcaccaaagctatcctaaaataaaataaagaaatatctcagactccttggaaagtactattccgaaagctctccgggttcaagaaagcctcaagaaaaccccattcttccaaatgggctaagatatgctgaaaactcacagcaattacaactcttagaaataagtgtgaatttcatgtttccatgtctttcttggattagtattgggctttctaaggcagaatggaatatctggccgaaagatggatttaatagctcatatcacttgcaccaaggtaaattttcatgaaatagccttcgtataaatgccactatatcctcttttgtaagaaaaaaaatcagaagaaataatagctagaagcttagcaacacaaggactggtaaggaatgatacttgttgagagaaccacgagagtcaatgatgagttggctactttggaattgtgatatagacatgggtttatccattgccttctgtgaacaaaggagaaaagaaaaagcagggccagaggatgatgatatcaattgtgtttggaatatttaagctcccttcctctctcaatatgatgcaacaaaagagagaagtaacaaattagcaaatagggtaatgtagattttaaaagatacatgctgtttgagaagttgaagcattttatgcttttaaagacgatagcagctggcatttattatagtcaaaattgctgccatggaaaatttgcaatgaagctttaagaaatcaccaagattatgatccagaattctaatgggttcagctttaggggtagattacttcaatctgaaagataaaacattgttatttttagactgattttaccactaagaacacatacagtcggtaaatacggtagctttgttgcaaagtgaaaactatttagatgaggaaggagggcatatttcatataaactaggaggcctttttcaactttacaaggtctagaaaatatttacttaaatttcacagtggtgaaacttccaagaataaaaccacgaaggctgatcagtactgaagttatttcttgtttgtttgttttgttcttatttttacccaaagcttcatagctggagatcacatgaataaatcacctctgaagtgagctgagtatgtgaatatcagacagaaggtatttgctaatacaggcagtatcttctatggcacatgtactctacttgtcagaaagaatgtgaaaaatataattaagatgttaattttggtatacctaaacaattaacatgtgtttccaactaaaagtaatagtttgaagttggaaacaatttgggtttgcctgtgtttctgaggcaagtttcaatatgatggggtctgaaattaattaattttgagttgttccttaaattcataatttaattgattaaaagattactcttctagagtttataatatgaaaagacttactagagaatgatcgcttcgctgatggagagcagaggaattcaaacttggagagatgcagactcagcataacagtgctgtacgcgaaaacaatacagaatgggtggtagtctttgttgctgttttaataaatgttatgtatatttacattcatggaatgtaaacaaggtttgtctagaaattcatggtaggtcattgcttctatatttttatgcttcttctttttaaaatgaacagctgaaataaaaatgggtgaatatattttaacactcctttctcttcccggcatctgataagcaagcatgtgttaattygtgtgacctattatcctcagcatctttctgtttgttgtaccctctttgagaagaattgacattcattataacagtagaaatcatttaaaatgtcagttcaaaattttactgcttgaaacagctcatccttcaataatgaagtcaataaaactaacttaatttaatttaaacagtgatgctgtattttaggcctggtggagtcattacaattagtaattcataattagaattttactgatgtccatgcaccctgttgccgagcatcatcaagaaaccgtgatgattggtggtaatttgataaacattcagaaccattgcattaattatgtgccttccaattacatctgaagttaatgaatgtatgcagatattgtggagatgaattcaaaggacagctcaacctgaattttaagatagtattttgtaatgttctaattataactttcctacttatcagcttttagacaaaatgaggcttatgtaaaatattaaatgtgaatattgttcatacaacaatctgttttctaaaatcttagtgattaatttgaaacagtagtcaatgtactttccatataatatggtgaataaaaaagctacaaagcgtattttagactgaattaacagcaaaacaatccataaatatggtgactagaaaatctcaaaaaaataacgtaaatgaccttcctaactttgcttctgttttctcatataaaacataagtaatgccaaatttaactttacttaattattgccaacaaattaaaagaattactatggctttgcagatgccaccgctgccaggagccccgttctatcagccatggtcaaccccaccaggttcttagacatcatcgtggatggtgagctcttgggacgtgtctcctttgagctgtttgcagacaagattccaaagacagcagaaaatttttgtgctctaatcattggagagaaaggatttggttataaaggttcctactttcacagaattgttcctgggtttatgtgtcagggtggtgacttcacacagcataatggcactggtggcaagtccatctacgggaagaaatttgatgatgagaacttcgtcctaaattatacaggtcctggcatcttgtccgtggagaatktgctggaccyaacacaaatggttcccagtttttcatctgcactgccatgtctgagtggttggatggcatgcaggtggtctttggcaagggaaggaaggcgtgagtattgtggaagccatggagtgctttgggtccacaaatggcaagaccagcaagaagatcaccattgctgactgtggacaactctaataggtttgacttgtgttttatcttcrccaccagaccattccttctgttgctcaggagagcacccctctaccccacttgctcacagtatcccatcatctttgtgctcttgctgcagttccctttgggttccatgttttccttgttccctttcatgcctagctggattgtagagttaagtttatgattataaaataaaaactaaataacaacaaaaaagaattactacaaaaagaatgcatattctcgtagataaaaatacataaaaattacatatcagtgaagaccatcaatatctttccttctctttactgatggggttgaggaaggagggcagaatcacatttggttgggcctatttaaacttaattagcagagtgtattttgcatagccattacaaaaaataattctctagaaaactgatatatacatgttttcaatttgagtgtgatatggtttggctgtgttcccacccaaatctcatcttgaattgtagctcccagaattcccatgtgttgttggtgggacccagtgaaatacaattgaatcatgggggaggtttcctccatactgttctcgtggtagtgaataagtctcatgagatctaatggttttataaggggaaaccgtttctctttattctcattctctcttgcctgctgccacataagacatgcctttctccttccaccatgattgtgaggcctccccagccacatggaactgtgagcacattaaacctttttttcattatagattacccagtctcgggtatgtctctatcagcagcatgagaacagacttatacagagtgatattggaaacctgggtaatgtccatagtgttttgtctgtagaactgagatgttgtgcctcttcagactactgtctatcaggttgcaaaaacatctagtgtagttcagactttatgctcattggtagccatcaaatctgttgttgtgcctgtaattttactacctcctgatctttctttactctgcctaagactctttgattaaggggccactgagcaggcaaactaacataatagtctcaacagttctaaaaaaatgtggaaaatgggctgggcacggtggctcacgcctgtaatcccaacactttgggaggctgaggcgggcagatcacgaggtcaggagatcgagaccatcctggctaacacggtgaagccccgtctctactaaaaatacaaaaaattagccaggcgtggtggcgggtgcctgtagtcccagctacttgggaggctgaggcaggagaatggcttgaacccgggaggcggagcttgcagtgagccgagatcgcgccactgcactccagcctgggtgaaagagcaagactcccgtctcaaaaaaaaaaaaaaaaaaaaaaatatatatatatatatatatatatatatggaaaatgctgttcctatgaagtagaaagaaaaaaatttttaaatggaagagagaaagaaggcaagggagagagaaaaaaagagaaaaaggaacaaaacactgtgatattattgggctgtgtcccgcccaaatcttatctttgaattgtagttcccataatccccattattgtgggagggacccagtgggaggtaattgaatcatgggggcggttaccttcatcattttcttgtgatagtgagttctcacaagatctgatggttttataaggggcttcccccaaccgcgcttcaccctgcacttttctttgctgctactatgtgaagaaggacgtgtttgcttccccttccaccatgattataagtttcctgaggcttccccagccatactgaactgtgagtcaattaaacctctttcctatataaattacccagtctcagttatgcctttattagcagcatgagactggactaatatacactgaaatttaaaaatatccaatgaaccttatttttcccaaagtaaaaaatcaaatgctgtttcctagtatataactacaaccagaaccagagttattacctactaactagaatttaataatttttcaggcttattttaattgatgatgtggttatggtactggaaattgagggtaaggattcataaccaggtactctgtctagatgtgtaattttgaaataagtcacagaactttctccaaaattaagagttcaggagagataactaaaaagtgccttactactcaaaaattctatgaacctatgaaaatatatcaacaaacatcatagtttatgcttggaataacatatagttcttgcacttaaaaaccttaattaagaaatatactcctagcgttgaatacttaaaaatataaaataaacacaaataaaacattactgccttattaaatcacagattttgatgttcattataaacagctctatttttgtaatatttaactttatttctttataattacctaggttctttaattataattacctaggtccctcgggggacctaggctgtgtccccacccaaatttcatcttgaattgtagttccagtaatccctgagtgtcaagggcaggaccaggtggagataactgtatcagaattatcagaatcccccatgctgttcttgtgatagtgagtgagttgtcaagagatgtgatgattttataaggggctttccccttccttcgacacccactccattctgctaccctgtgaagaaggtgcctgcttctcctatgccttcgtccatgactgtaagtttcctgaggcctccctagcaatgtggaactgtgaaccaattaaacatcttttctttataaattacccagccttgggcagttctttatagcagcatgagaaccgactaatatagttcttactaactttcaccttacttacatgctgtattagtttcctagggcttccatcaaaacattaccacaaactagatcgcttaagaaaaaggaaatgcgttttctcacagttcagaaggctggaagtctgaaagtaaattgttggcaaggttggttccttctggagtctctgagggagaaaccattccaagcctctctctctcctggcatctggtggttgacagcaactttgactttagggataaacctaaatccagtatgatatcatcttgagatctttaactaatcatatctgaagaggaaagcaaagaccctattttcaaataagtttccatttttagtgttagggttcaaaaaccgataccccaaaatggggttatttgacatgctcaacagaaaaagattcagtatctctctgcccacaacacacttcctggctctcaatcttctgtgtctcccaaatcacaggatcaaattgttatctgaagttcccttatctgcctaaaatttggacttactaaataagaaaacaattacctctggtatcttccctgaattttcattaaccgaaatcatacggtgggaagaaagactcaagtctgtcaacacatccagacagacttttgttacaaaccgttgtctgcccaggagctcaacagactttatcccacatcactgtatgttgtttaagcccattgaattcccctgaaaattatttactaccccctaaaatcatccgtacttctccatctcttattctctaagaaggaggctatataaccattggtttcctattgcatggtgggaaaatcactctgtaattccctcccacacccacccccaggcatgctaatacatttgaatgccttttcttctattattctgcctttgtgaattgatttttcgcaaaaattcaggaggtaaaagggaagtttacccttggcagctaccaggcagggttgaagctgcagtgagctgtgattgtgccactgtactccagcctgggagacagagaaagacctttctcaaaaaaaaaaaaagattactgttactactgcttatggcaaccacaaactcattctctgcattaattcaatcccagttatgtcacatttaactcagatccaacagccaaaatacgtgaattattattttttaactttgtattttacatcacatctttacataaatactaatttattcattctaggtggtgagtgacttcacttccatgcattatttttctgtagtaactgtttccaaaaggttttccaatttgatagggtgtttaaatggttctatggttttttaaatggaaattccttagcatatcaaatgtttacataatactagaattacagacactcttctcatctcttggtagtcttagaaaagctttgtatttgctgcggaagacaagccacagaacttccagaaccatttgtgattttctttcatattaaaaaaaaataattcaagtaatgaatctgtaagggagctttttaggtagacttgtgtaacaagggctaagcctctacctgccacagggagattgactgtgtcttgcaattcaaggttatatttcaatcctgaatcaaaggtacaatgagtttgcaggcaattggcttacgtggcaagaaggtagcagaaaccattgccttggagacttaggtttacgtaaaagattgtaatgttacaaatagactgcaaaatgtttaaatgaaagcatttaccatgtccatagaaagctacattactgagaaattttgtgaataatatatttgaatgcagttctttaaaagcagtacctatatttgtataatccaaaaatgtgaacacaatataacaactcagaaattcttattaccctaattgccatttgtgatataaacataaatgtttacgagcagtggtgcatgctttttgttgttgtatttggattttaaaaaatcggtttttcaccaaactgatgcttttgaaagaaaaaaaactgaatattttggcttcaaaggcttgagaaatagttttaatttttctatggttgtaatagtctctgtaggaaaatctaaattaagagtcatattttagcacaaaacaataatttcattttgtagaactcagagtattttttaaatgcccagaacagaaatttcaatgactatttttttaacctcaaaatatagccttacgataatcactgggacaaaagcctgcaaaatatacaaatatcgtatgtgccagtgggccagcattcctcaagttgctcaattgtagtctgacataatgggtgcagggagctttctccatagagttaccccctggaggaaggcttattattcagcccaatgatgaaagtgtttgtgtcatccctgctgccagtgaaagatgttgcccacacagagtgggagctttgaagtcttagtatttcagtcctcaagtttccatgtgtcagttccgaaaacaaaatgtagaaaaaagacagctgcagaagaatctccaggaatagcctgagtcagtggtaaatgagcaggcattctgttggacatattgatttagtttgtaattttcccactgcttgttaaaaacgagaatgtgcttagatatttcttctctgtagagcataataggacattgatcttttcataaaatgtatttgttgggggaatgtctgtccacttgagcttttacaggggacagttggtttcaaatgcaaagcttaatagagatgcatgcataaccgtattgagtgaacatacgaatgaagggaaagaaatgaataataacttattcttaccagatttccagagtcatgtaatgaaaatgcaaatgtgaacaagatgagctggaaactgctggttgtaatcccagccctgtttgataaggggaatgtactcctgtcacttcctgcttatgaaactttcacattaataattaggactcttgcttcttagagcccaaagttatttgcattgcttcaatatggcatttatattaaaaaatattaattactgtgatggaacgagagaaaggtaaagaaaacagcacaggaaaaaagacaataaaaaggaactgtcatttagtctgtaaatggaaacaaatatttactaaatgttgaatatgtgcactgtatgtttggggttacagtgggaacgggcattgggtgggagtataaagatacgtaaaatattccccgtcctagaataacataaaaacgtgtttaaataaatactaaaagcttaaattgggaatgtagattgtaaaagagtatagaaaatgcaacatggagagttacggtttacaagtgtaatcataattaagggagtcattaggacatgtaagcatacg

SEQ ID NO: 93515 - DNA, 12262 bp, Homo sapiens
acttcctgtttattaactatgatagctctaaggtctttatccttttttcttttttttttttttttttttggcagccttagtcactccttggtatgagtccagcaccaggctacaatttgctcatgatgaggctacagcatgcaattacactgtctgttgagtttgtacctattctcctccgggtgccacccaacttcctttgctaccaatttcttggaattaatcagctgatttcctaggtaatgagactcaaccaagaagttatttggggatgacaaatactgtcataggccaaacatccagaaccctgaaactcccatcacatcacaggcagaagggaaggtttcaatatcaaacaaaacaattctcagaaaccttttgtgaaactgagcttttccaaccaagttttcacagaaggaaagctggtgatggggataagaggtgtgatggtgaggtgctttgagaaaacagaatacaatgagaggacaggaaagagtaaggattcagcgagggaaagtggcctccatgggatcctcagacaagaggcagggaaggtcaggaagcctctgggaaggcacagagaagatggtgaccagcattacggtgcagcagatgatggcctggagcttggacctctgtagaatccagtgagaaagcagaggtagaagaaggctcagagagaagagctactttgggtccccgggaggctggtaagacgttgaaggcagagattaagatggatccacagaggagcagtgcaagccctgggtctccaaggtagccatgtcttccacagtctcccctgacagcagactgccagcttccacggccactacgctgcacagctggggaatcctgaggaagctgtttccacaaactgcctatggcaaggatcttgtccagggggctgcagaagacaggaggaacaagcaaaaaccaaaggagctgggtgggagcttggcagagcaggaagcatgccacattctcccacctgccagcttcacaacagtctgcctgtttgtcaccgtgtctatagtcccagctacctggaaggctgaggcaggaggatcacttggacccaggaggcagaggttgcactaagccaagatcgcaccactgtactccagcctgggtgacagagggagactccatctcaaaaaaaaaaaagaaaagaaaagaaagaatggtgagatcaaggttagcccttgggcagccttgcattgatgaaacaaaatcttaccctttaatgttaagcctgtttctctttttgactctgcactgatattgagagacaagagtgagtggctgggatccagttctcactgtcctctcccctccaggcaagctccagacattcattattcatgggtcatctgatgttctatcttgaataaacagagctctgtgatccatcttgttattcactttaaagtagattaaaatatgttatttttctttgaaattttcaagaagggttttctgtcatactcagttgacttttccagtccctaccctcttttctcatgaagggcacagattcccagaactgcgggagaatgtgtactccatcccaggggaccctgcccctgatgacagagcttgagccccagcacctgacttgaggctttcacaggctcagagcatttttctgcctatcagccctaacacaagggaaagtcttgacccagaaaccctaagatgggactgtggcccatgactaacagttgaggaactcagttctcctacaggtaccctgaactttcttaataatccaatctgtggccagtgaatcactgggattagggttttatcctggagccctaacccagagagaggatctgtgggcttcagatataaaccccagctcccactcctacctctgctctgttccccttgatgatattctaatctttcctgggagtgtccatgccaggtggctctctgtgccaacataattgatctagaaaactttggaagggaaatagggtaaggttgcactctgctggaagttggccctagggttcccttgccagattgatgtgtctgtgctttctaagtgttggttgtatatatatatatatatattttttttgagacggattctcactctgtcacacaggctggagtgcagtggcgtcatcttggctcactgcaacctccgcctcccaggttcaaacgattctcctgcctcagcctcctgagtagctgggattacaggcatgcgccaccacgcccagctaatttttgtatttctggtacagatggggttttgccatgttggccagtctgatctcgaactctcaacctccagtgatccacctgcctcggcctctcgaagttctgggattacaggtgtgaaccactgcacccggcctaagtgttggttatattttgattcctctgtaaatagtagaggaacagcaacagaagcctcacaatgcacaaaggatggacagaactagtgccccaaggctgaggtgcgcccgaccagagctgatccgacagctgcctcagacaactgagcacagagaatgtgtgctctggactagaggtctgggcccatgtcatggagatagagaacagtgacagtatccttgggggtgacagagggcccttaaagaggaaagtgaacccacaatccctccccaatagcatccagccaagcagatcttgccacccttcctgggccttctaaatccttccatcctctctggaccttgatattttccaattctactctttcatcaaatcacaaatagactgcagtactattttctctttattccacctacaacccagatgttagctgggttgtcctttaccctttgggtcatctcagctttgactctaccgattatatagcctttgaaagtcggaagttctcccaggaatttttgctgattcccagggattttgcactctcaggattctctttcaacttcagcttcccacctttcatggacccagacataggacacgaccccaccttcatattcacgcagaagagtctactaggacataaaagcattagtaagcaatgcaggctttacgaaagatattttaagtgatgacgagggccagggaagagaactggcagacaactttaaaatccccaactgcagaatgaaggactaaattacttctttacctggctggggacagtggctcacgcctgtaatcctagcactttggaaggccaaggcaggtggatcacttgagcccaggagtgagacaagcctgggcaacatgatgaaaccccatctgtgcaaaaaataccaacaaaacaaaacaaaaaaactgaggcgggaggatcacctgagcctagggaggctgaggctgcagtgagccatgatggcgccactgcactccagcctgggtgatagagtgagaccccatctcaaaaaaataaaatgaaataaattacttccttacaaccttggcctggcatccaatcccttcccacccgcatgatgacactttgccagaactggcagcaaaactatcaagaataagggaaagattctgttaacattgctactggaatatcgttttttataggttaagtgaacagaggaagtaaaaaaatgttttaccatgagttcatattaatatgtcctatacaaatttaacattacagagtgtttacatttattttatttgcatctcctttctctcctaatcaaaaccttggatcttaataatattagcattcattaaaatttttttgttttttaataagagacaaggtttcagtgttgctcaggctggtctcaaactcctgggctcaagtgatccacccaccttggcctcccaaaatgctgggatttgatgtgagctaccacgcccagccaatattaacattcttattttttatcctaattatatatgaaatactttaaaaattataacacaaatattacttgtaataataaaactactgagggaagtttaaaattatttgcaattctttttttcttagaatatgtcccaccaagaatatatacaagagaaacatgttccaaagtcacttggaataattcttttctctgtgtgattatgtaaccaatttgatagagttaagtttattaatgtcaatttattttcaattttagggttaactttattttccttgattttatttttttgaaaaatgtcaaacactttatgtggttcaaaagtaaataagttatattcagacaagtctcacttccaaccctgtcatttgatgcttaaagtggttcataaaaacatcatggggatatagtctagattttaccttttctctcaagatgtggaggaatgtgaggagcacagaagagcagcaacttgtagaaagagacacagttcaaatcccatttcatgttggaactgggcatttcccagactttttgagacttggtatcttcacgtgaaaatgagaacaatagtacctgcctcctagaaatagtctccagattaaatgagataatatgtgaagcactcccacctcacaactattttggtaagcaaaatttgtaagattccacgtgttaaaaatctcttcctgtttacagtattcagaatggattctgtttcttgaacccaattcttatggatatggtacaaagcagacttataccggctcttgtgtttccagatcactcctttactttccatactccataaatgcaatctagtctcctagcaattggaccaggcagccaagtgtctgcttgccttttgaaattatttccctgccttattctcctttctattttaaactttgtctgcaggaagtaaatgtggtcagtaagataacctaattccctagacagatgcaaccatgcttgtggaccacaactgcactgcaataatatactgtagagaacacaaacttttctaagtccaccatagtgaatgacmtagattttcttagataaaaatcatgtcagcatatatcagttcaggcagattgttttgtttatttctgtatgaaatgagaccaagctaggcatttggttgaattgtaggggaggtggcaatctgagacctggtatgtagcaacctggaggcaaggcaggccaaaagcataggcagaatgggcatggggttgtctgctcattggaggatcataatctctaccgtgactctctttccttgccccttagacctcgacctgaggctatgagttaattgagtctggggatgacatgtgtcaccatgaatcacactgattctgtggaaaagcatgatctgagccccaagcaacaggaatataaatgaatcgtcaaatccctggtcatttataattgggtatgtaaattacagcttcttgataatacgaaatagccaaggccttttcatttgtgaagtcagagtaaagggtatgttactatatccaaagacctcaaaaatagttcaaaggagatggaagtttgttcctgtcactaacaatgctgaggtccaggttggtgaatgctttttctacatgcagtcactgatgaacccaggttccttccatcctgttgctgtcaccaagggcattgtctttgtctgcatagttagtgctaggccacaggcacattcatattcagctcaagggaagaaggaagagagctgctccgggacaaggagcttctttacattgaagatgactcagaagttgcatttagcacttccatgcgtccctcactggcctgaacttagtcacatggccacacttagccgcaagggagactggtaatgcagcctccaactgggcagccatacgcccagctaaaatttcattactgttgaagaaggggaacgttttcctagacaactatcagtctctgccatgctcttcgtcctgcttcacgttctccttcttgttctagctgtgagcctttgccattcactaatttgggccttagctgggggaagcctcctcagtgtcatcagacctcctggtgaggtgcaattagccattcaagcttcttgacactgaaagaaaagctgggccccacagctggtcctccaagatggtatcagttataccagtgaaggagaagaaactcctggatgtcaaactaggggagctgccaagctggatactgatgcaagatttcacccctagtgscattgctggagcatttcaaagaggtttctactggtactacaacaagtacatcgacgtgaagaaagggtgtctcagggggttccacggtactggcagcttacatgctcttcagctactgcctttcctacaaggagctcaagcatgagcagctatgcaagtaccactgaagaggggcctgcacggacagcacgctctgtcgccctgaccacgacctcctttgcccacacctgtccttgaggaacgcgatccttgctgaatccttttatatcctaatgggaattaacctccacataaaagacgactggttaaaaaagaaaggaaaagctggggcccaaagagggatccctgggagctcagaccagggccagagctcttctcagagcacaaatctggctgttttctaaaaagacagttttgatacgtggagcctttttccacaatattgtaagagatgctggcttggctgtgactggaggtgactcacacctgctctttgtagagagcataacactgttcctgcaaaaggaaagctcatgccaggtcactggtacccgcagacaagtctgttcctctttaagagattcttaaaggattaaagagcacgcagtgcaaaggctttggatgtgctgagttgcacgtagctgaactagaggcttcaataatgtggacagagtgcaagaccagaaattggaaaatgttacagtggtctcagctcctccatttgtcagctatgtgtccttggtcaagccacttcccaaccatgggcttctgttttctcaattaaaaaatgttgactaaattgggtttattactaatctttgcgcttctacagattatttctgaaactcttatcatgttccaatttctgcttgtccactgtgatataataaaaaataaataaacctctggcctttgtccctggctcctggtgtacagctcctaaacccttagaatctttggggtgatgagagtttcttttgtatgctaatgaaagactgctggtggggtcccctaggtagcttcaggatgggggctggttgccagaaagaccaaggatgatcggaggtttggaaattccagcctccctctctaccctcagacctcgagggagaggaaaggagctagagattgagctaatcaccaacaaccattgatttaatcaatcatgcttaagtgacaaggcatccataaaaaccctgaagtgatggggtttggagagctggaggtggtgaccacacagaggcgctggaagggtggtacactccaatagggcacagaagctccacaccccttccctatacctcgccctgtgttctacctctctcccatttggctgttcttgagtcatatcctgtataataagccagtaatagtaaagcaccttcctgattttatgagtcattatagcaaattatcaaacctgaagaaggggtcacaggaacccccaatttataagcggttggtcagaagtgcaggtggaaacctgggacctgtaactaccctctgaagttgggtgaggagagcgcaatcacctggtgaccactgaagaggccccagagacaaaaactcctcaactgaggaatttagaaggaaacgaagaccacctggtgactatcaggcaggccatccagaggcaaaactccgtatctggggaaatgagaagtaactagacttccctattatctaaagcaggcactggtaccaggtctttccccgccaaaatttataagtaactagaattcctatacatctccggaatgctatgccgaaactcattgtgcaacccttgctgacatcagggcacaaaaatgtctacatatgtaagcatttatcatgacctatgtggctaacatggtccaaattatccttaagctcccactttaaggtccataaatgctcctaaggaaaaaatccactgtggcacgctcagtcctctcactgaggcaccaagttgcactcatctttttatgaattttattattatttatttttgagatggagtcttgctctgtggcctaggctagagtgcagtggcacgatctcagctcactgcaacctctgcctcctgggttcaagcaattctcgtgcctcagcctcccaagttgctgagaattacaggcgcccaccaccacacccagctaatttttatatttttaatagagtcggggtttcgccacactggccagactggtctcaaactcctgacctcatgtgatccacccaccctggcctcccaaagtgctgggattacaggtgtgagccaccatgactggcctccattgcagtcttctgcggagttttttctaacagactttacttttcaaacctatactattgtcagtaattcttcttaccaacccacaagtccaccacttctcaatgccggggctctgacgcctcgcccagcatgggtgacagttttataggactgagcccttcacctgtggggtctgtgccaactctaagtacttaatgtttggattgaattgaattgcaggacacccagttgacgtctaaagagttgttaaattagttggtgtgaaaaattaagggaaatcccacacatttggtgtcagacatgttgtgattaaaaaacgttcatgtccatggcctcttcttatctcttttcagaacagtacagcagtaactatagggaatagacagtttttcccttctctcctcactgtttctcctgtgtccattaccaaatgtggaaaatccaaggactcccaagtgactctccctttgtacttcctggggaccaggatcctgggctagtactttgggccaggctcagcaggtgtctaagggattttaacacagcgttgacaaatggttcccacaatccaagtttatggagagactgaagtagacatcaggcactgacagaaatgaaaactgtgtacaactgatcattagggatatgaaaatcaaaaccataatgagattccatctcacaccagtgaaaacaactattactaaaaagtcaaaaaatacagatgctggtgaggttgtaagaaaagagaacacttatacactgttaatgggagtataaattagttcaaccattgtgaaaagtagtatggcaattcctcaaagagctaaaagcagaactaccatttggcctaacaatcccattactgggtatacacctagagaaatataaatcattctaccataaagatacatgcacgtgaatgttcattgcagcactagtcacaatagcaaaggcatggaaccaacgtaaatgcccatcaatgacagattggacaaagaaaatgtggtacatatacaccttggaatactatgcagccataaaaaagaatgagatcattccttttacaggcacgtggatggagctggaggccatcagccttagcaaactaacacaggaacagaaagccaaataccacatgttctcctaagtgggagctaaatgacaaggactcatggacgcaaagaagggtacgacagacactggggtctacttgagggtgggaggagggagaggagcagaaaaaataaccattgggtactaggcttagtacttgggtgacaaaataatctgtacaacaaattcctgtgacacaagtttacctagacaaaaagcctgcatttgtacctccaaacctaaagtaaaaaaaaaaaaaaaaaaaaaaacaaagaaaaatgtgtgcaatcattggagcaatatttcttaagattctatggacacattcaaagcgtgagtggaggcatcctgaggcagagtcttgtttccaggggtgaaaatgaagaaagtcatagatgtccacaaaagtcattccaggatgacgaaagaaataaaatgcaaataggagccactttttgcaggttcttacactagtttaccaaaatctctagtttttaagatttttaaaaacaatttcggccaggcacggtggctcacgcctgtaatcccaacactttgggaggctgaggcaggtggattgtctgaggtcaggagttcaagaccagcctggccaacatggtgaaacctcatctctgctaaaaatgcaaaaattagccaggcatggtggcaggcacctgtaataccagctactctggaggctgaggcaggagaatcgcttgaacccagaaggtggaggttgcaatgagctgagctagcaccattgcactccagcctgggcaacaagagtgagacttcgtcttaaaaaaaaaaaaaaattcacacttggagagaaaaacaaaagtaataaaaaggtagaaagcaaaaagtgacttcttccttcaccccagttccctggtttctcagttctctccaagacctgccttccaggtcagcccacacccatccaagcatatatgcaggtccgtaactttgtggggatttcatggttgccctgggttttatgggattgccttactaagttaaatcagagaaaatcagagttgcaagtagagcactggccagatggcgacctcagcattctttttcatctctcattcagtcttttggaaatttcataatacatgtccttggctttcctcacatctaatctgaagcttcccagacctctacacctgactctggcctttttttagagcctgtatttaattccagccacatctcttcacatagactgggcactcaggtacaaacagaattgatcactttctctgaaacctacttctctttgccttttcccggactccagcttttcccactcaaccccattgggaatgtcattcttctttttctccaccttctgcctcatggctctgctcctccagttagttgagtccaggaataacttgaaactctggaatgctttttttttttgagacagggtctcactctgttgcccaggctggagtgcagtggtgcaatctcgggtcactgcaacctccacctcccggttcaagtgatctcatgcctcagcttctgagtagctgggataacaggcatgcaacaccatgcctaatttttttgtattttcagtagacagggttttgctatgttggccaggttggtcttgaactcctaggaggcctcaagtgttccagccacctcagcctccctaagtgttgggattacaggcataagccaccgtgcccagactctctttttcacctttttccactgctctcattagttttatcatcaccactcactctgtaccaggcattcccctaagtgtcttacgaatgtagactcattttatcctcacaacaacctgacaaggttggtactattattatatccattttatagatgagaaaactgagactaaaataataaaatctccattccctaacttcccagactccaatgtgcctcctgtacctagatcttctgtggcctctgcagcattcaagacccaactcagctgttaattcctccaggaaatcttcctagagttcctactattatcataatttcagacttttagtctttcgtctcccatgcagggttgtcaaataacatactgccccaaaaagttgcatggttcatatttacactgaaaaaatactttttgtttattgaaattccaatttaactgggcatcattatctatatttgctaaatctgacaaccatccccacctaaaaccataaacaatttgatagcagggcttatgcatttttactttgcacccgcccaccctcaggggctggcagagtgtggaccaagtgagtactcattctgctcattgtaccgaattgaagtcaggtgcttaaaagaggtttctggctgaggcagagaattgcttgaacctgggaggcggaggttgcagtgagcgaagaccgtgccactgcactccggtctgggtgacagtgtgaggctccgtctcaaaaaaaaaaaaaaaggtttcctttgtctgcttttatcatcctgccataaggaatagtcttcttaagtactcccaatgcaccagacacagtgctatgtgcacagcaactaaatccaacacaaaactgagttcagtttgcccatctataaaaagagaatactgttaaacacccacctagtagtctttcttctgggatacttgtgagaatcaaatgtaaaaaaggaagtgcaatggtgctttgtaactgcaaagtgctgctgtgaaggatgactatcactaacattggcagctcaaatttagcaatagggaaatagacaacctatatctaatt

SEQ ID NO: 93516 - DNA, 170602 bp, Homo sapiens
agtaggaatttatatagatgaattgagtaagttaaaaaaaattacctcttaaaatcacttgaaagatcgagtaagcattctgaatagccaggattctgtttcttaaaacaaatacaatcacaaaaggatctctgtttaacaaaaggaatgccaaattccagccaatgagctatggatttcaagcagtagctaaatggttgatcaattcactcaacaaacgccagttgagcataaactgctaggcactgggttgataagaacaaagatttttttatagaactttatagtagacacttagattagtggttctcatgatgaagtttcttctgtttataataagatgaaaaaatagcgacaatgaaacttctcccccacaaaactacatatattctacttaaaagaatgttttttatcttgagatcgctttcttagttcttggtgtcaacataatctttcttttcggatattatggtgagattagggctttgagcctttttttttggtcattatttgacaaaactcaaaactgttggctcctacagttctgggtgtggtggaggggagcattttactagcttgtgaaaaaccactgatgtagacattcctttggcatttattgggaagggattcgacctttaggtttgacactttaaaactactagtacaatcagctcatttattctggagctaattatcagctttgtgagttctctagattcctttttataccatctctttttggaagattagtgttcaactacggggaaaaaagtaaaagggaaaaaagataaaacaaaaccctagcagattaactttaatcaaatttttggatgttagaattcacgggggagatgaagaagtagagatttttgaccaaaatagggcatttgaattatttttggatttcaagtctggttacatttgcaacttcccacctcttcataggaactaataattttataatatattttaattcaaattattacctttaagcattattagcagttgagatggcagagatagaagcattggaaatgatgatcctgaacaatatagtcatatcctgaacatataatcggtcattttcatagtctttcactcaataaatgaatgactcaataaataaatgccgggtactgggatgcagggataaaagacactgtcactgtcgttaaggggtttataatctagaagagggagagatctaagcaaatcagtgccctgaaagttgttataggggatgtgatagcgtatttggtgctatactggggactagaattggaggcgttaggaatggtggaggttggaagtggtggcaaagatagtaaggatctggaacgaagacatggaggtgaaaataggaaacagctgacctattacaaaaattaccaccatgttagtatggcaggagtgtggggtgcggtgggttgtagaggtatggcaagggaaaaggctgaagagttcagcagcagctgagtgtagaactttagatactttagatgctttgtttaggaatttgggctttatcagaaggatttatcagaatgtgttctgggggctgggtgataggacagaaaggggttttgtatgatgagaaacatttcagaggcaccaattgagacgaagttaagcagccatatctattgaagacttctcagaccctttatattggttagcatttccatgactatttgactgctaaacttgtggaaggagcggctatattatgtttctcagaacatggtttggagaaccctgtgatatacaagggggaatcatcaaaatgttttaagcaggaaattatagacaattatggaatctaattctgttcttaacacataatgtgatactgctcattaggtattgtgcagtcagtatttttaaatgcccactattttcaaaattatctaccagatattttgggagattaggaagattcatgagacatcttgtctggcttttaaaaaaataacatgttgattaggttgggtatggtggctcacgcctgtaatcccagcactttgggaggccgaggtggatggattatctgtaaatgtcattcatccatgtagttaattgaataaaaggcaatgcgaaagtgaggaagttgagaataaacttggagaattatggattttctggtgatccttgctcaatgctgatttctacagggtgtttaatgctaagcttttgctttcaggactaggattgtttctggcaatggccttcactcagacagttcagggaatacaaacgggtgaaagctgccgaattgaaacttcaatttaggtgatctgagagtggaagtagctgttagtttgtttggtcctcaaaagtacattgtcaacattttgaagttttggtagattaacatagagttagctttacagattgtgaaggtatttccaaagaatttaaagaaaaagttgaaggtgaaagcagttgaagttgcatgtggtggaactagaaatatcaagtctagaaatctgagaatgtcaagggagagaatcttcaagtaatcttcttcttttttgttatttttcttttttttttttttgagacagggtctttctctgttgcccaggctggagtgcagtacgcaatctcaggtcactgtaatctctgcctcccaggttcaagcgattctcctgcctcagcctcctgagtagctgggattgcaggcgcccaccaccatgcctggttagtttttgtacttttagtttcgccgtgttggtcaggttggtctggaactcctgacctcaagtaatctgcccacctcagcctcccagaatgctgggattacagtgtgagccacctcgtctggccatcaagtaatcttcttgaattaagtttccttattacatgttcgtcatactacctagtggggaaacatggaatcagagtatttagagttggttggtgcatcataaggcttttcattgccagttgtgtagtggtcaagagcactggctttggaggtgaatgtcctgagttcacatgtatcaatcagattacccaattacttaaggtccctgccccttactaagtgtaagaccttaggccatttacttaacctccctatgcctcagtctctgtgtctaaaaaggggaaaatgatagtatatacctcatgaggttgtggggattaaaagggctaataaatgtgaaatgcttagagcagtgcatggcacatgctgtgtgcacagtcaactgttatctttaggatttctctgttgtttgttttcattagaataatttactgtggaaacctatcaagtagtggttttctggcctaaataggattctttggagaatagcttgttaactctaagaaggagtggatataaatgtactgttacaattttctaattcatgcatttaaaactagcaaatatttggcatatttaaataataatagctaacatttcctgagcatatactatgtcccaggagttgtaccaagcacttttaaccaattaacttatttaatcattatcttataagtgaggaaactgaggccccgagagggtaagcaagttgtccaaggtcacagaattggctatgggcatgaccagcattcaaacccagatggtctgtgttcacggatcacacacatccattgtgatatcccatctttcatgcaaatatatgtattttagatctgtttgttaaagtgttttattttatttaccgcaaacattaattaggtggaaaacatgagctaaaataattttgttaaatcatttcagtataaaaatacatgttagagccatattaactatgattcttttgttctgtggaagtatgagtattagtttgatgtaaccaaggcatccagatgcatacatccattctttagaactggttttcactttatgtctcagctacatattttcagagtggtttatgagtaatgctactttgcatgcattttgcaaacttcaatccttttctactatccatgcaggcattaaaataattcggataatatcaaatcctaacctatgaaacacattcttttaggattagaaaatggagaacagtgtgacaaattgtgctttttgcattcttcagtatagaaagactagactgctctaaaagtagtcattttagttgccccactttgttggtgctaatgtatgtactttctgggtctattttcaaaaagctgggcaaaactaatttgccactagatggagccctggctatttgggtagaaatacaggcaacagaatattaaatcacacagtcatatcatgctggagggctcccggtatttgtggccctcaggttttaattgtagaatgcatctttgttctttccctgacctgcagagtgacatcactgcctctsttcctgtgcgctggctttgacataagccagatggccaccgtggttggtaggcgcccaggctgcctggtacaggagttgatgaaacagaataggaagacgttttatggtcagctgtggaagcacagtgagactgcagctttgctaagtaattacatttactgtgtgtgctttattcctcacagagaagggtcacagggaaaaaatacatttttatttatagtgttgtgaggtatagacctttgatcttttattagtcagtagtctgctccaaaggaatgctctcttttccctgctctgcagtcactcgtgaaaatgacatgtttatttatgtttaatggttctttcaggctgtgcattgtgatacttaccttccttttccctcctctttgtctgcagttagtaacacaaaaatgttttagtcttgtagtgagtttagtttggggaagtcagagttcaggcatgttaatacaagcagatttctgtcagatatactccagagtgatttagtaaaatatattactgtttattatrtgtttgttcttcaaggagktcagaagagtccggaacagactttttttggggcgggaagcaggggaagtggtcaggaaatgaacaagacattaattttatattaatttttggacatttaatggttaaagtcacttaaaatgctaatttgaaacaacatatatgaagtttattaatctagtattttccatttgcatttaaagttaatctttaccaattgaaatattgtaaaaaacttttaagaaaatcctaagaattgaacttttctctaaagtttaatatctacacaatttttagattcttccacataattcatttccaaagacattaaaaaacatttttacactttttaaattactaaatcatgaatattattcacaggattgacctagaaattataaatcatataattaaatgaaaattcatatttgccatgctttattcgaacttaacgctgttttgaaagtgaagtcccttaattgtccttaggttttctgggtctctattttataaaatgaaattctaacaaaatgtgtctcttaatcttattattttatagtcttctccagggagggagatttgccaataattgctggaagaaggcagcatggtgtaaggaaagaacatggctttgcagtcagtatagcagggttttttagtcctttttccactggttatttgctttgtgcccttggacttttgagtcacagtttcttcacatacgtattggggcataaaacctacctccttggtttattgtaagaattaaatgatacaacgtgtatattaggctccagacagttcctgtcacatggtatgaactcagtaaatgtgaattcctttcaactgtttttaaacttcctctcttttctcaacctcttgtaaactgtgttcacagattgcactgctatcatgtagtgtgtattttacctctaaggtacaaataaagctagattgaaagtaagctcacgggctgaaaaataggcgtttgaaatttattagcagtatgtgcatgtgttcagttccagataaaactgtaaccatcagttgtgcaatgaatgtgtttaatatttgtgatgttttaatttgatttttgtttttgttttttctcctactcagctcttgcccctgttctttgcttctcgttttgttggtgaagatatcacagtgatgtctgcattcaacctgctgcatttggtgacaaagagccagccagtagcccttcgagcctgtgggcttccctcaggttgctgcttgttgtactgtacatagtgaaggcacagggccaactgggtgtttctgctgcaggaaatgatacaccatcatgctttgctaaatttcattttcttttacttgggccctaatttgaagacggaaattggttataaatcaccactctactttgagtaacattcatttccacaatccttacaacccttggaacattgtccagtttccttgcccagtgtataattgtcactaatatttcatatcttcttgttctttaatgcacactacacatctgcaaatcataacgttcataagaggctggcagtctgagtaagaaactgccccaaatcacacaaaataggacattcatcttgttaaaggataatgaaaatgcttttcattccacatgtggtcattcctttaggaaaaaatgaaaatgaacaatgttagcatrattaagttaccaatttattgtagttaaaaagaaagaaagttctacttaacaatggccaaataaacagaactaatatagcatgcatcagtgggttcttaaattagaaccactgtactttttaaaaatgtgattttaagaatttaaataagtgaggcatgaaagtccaaaattttatatgcgcctgtatcataagcttaatattttaattttattatgaaaaccacaatggctaaatattttacttctgtgagcgtgattatcaatattatttacatttttccattagtgtacatatctatcactacattgtrtaaggaatttaattccaactcattagatgttaactatgcatgccaggcattgtgttaagcagtgaggatacagtgataaataaggtaaagctgatttttttcaacaagtacaaggtggaaatggaactgtgtgaggaccattaaatcatatgttgacctgactagactagaggtatttatacttggtgtgttatggtaattcagaggaggttgttcctagatcttttctttaggagaagaaatgttggaaggaagggaagatctctgaagtttaaggagggcattatggaggatatggtgcttgagctgaatctcagactggtagcacagttagcctggtttctaagcagggtggtggggaggccgtttttaacaaaaggagtagcatgggaaaacatgaaggcctgaaagagcaaggcatgttcagagaaatacagttattcatatggctggtttggatgtgcaagggcaaatagaagaggtaaggaaggaaaggtagccaaatcatgaagcactttatatgatgttttaaggaatttaagtcttggggagatgaacaggaatcacatgacttcatttgcattttacaaagattattgatttagtatggtaggaggtcagtgctggtttttcagatgtttctgtgagagaggctgggatggcaacctgattagaaggagtaaggtatttgtcttgaagctatatttaaatagcaaatacactttttttaaaagtagatcttatgtctgtttatggtgacatgaggggctaatgaagcttaatgtatagaggccccaaccactcttctcagtatgccccctagccccacatccccctgcactgccaccataaagagtactggaggagtgtgaggctggaatgacatgtgaagtgctgaagacttgactgtggccattacagtggagttgaaaagaaagattgtaattgggagagattcagactgtagaactgacaaggtttgtctgttgaattgtatacgaccttgagggagaacctcaaccactagttcttgtgctttgcagaaccttttcaatgctataccgtacatatcacaggtggactatggaggttatttagattatacataatgatgttttcctctggaaaaagctccaatgtgtaaaagtacccagcatagttcttgtaacattggtttgccaaatacaggggaggctaaatgtttatagaaaccacattaattaacagtgtattcttcaagatatgacagtcatggattaaagggtttcataatgagattgtttaactgaaatataaatatctttaaattttgataaaatgattcaaagataaattcagcaaagctgatagtttttaaaaaattaaccattatggtacagtgcttaagcacacaaattctgtatgaggtcagactgagtttaaaatctgactttgccactgactagctgtgtgccttagcttccttgtttgtaacatggagataataatagtaccaacctgaaagggttgctgtgagaattaaatagattgggatgtgaaaagtgcttaaacctgtggctggcatttagtaaacaccatatatgtcttcactatgttcaatatggaaattcatgtatctgtattaatatagatttatgtttttccaatacaacagacttttcaaacttttaaacatgtcctatgtttcatttaactattttttactttcatgggactcacaaatacactttatgtttgaggaataaccatcttgacctgttgttctgatctctttattttacttatgcaccctgctgaaccagaattcaagtcctataaatatacaagagatttcttttattcttactacccagtactggtaaaagcccaaagaaactctcatctttcttatctagggcttgtaaacccattttaatttgaaaaatgagttgactagaatagtattccataatttctcgaccattcaagcaccactagtttttaaagtgttatgaaagtcagtctttgggtgtctacatattttataacttggatttagcaaaatctgtatcatcatcaatttctctaacaggattttgctcttagatatatagaaatgttgaagaaattaacttcaacagtaatgaaacagactgcttaaattttgaaaaataaagatgaaattgaaatgggaattctagtccctattagtttgtacaggtagggaagagaagaggccaaaattggaaatacaggaagtgaaggtgaaagtttgaagtcttgctttaatataatgttgctggtcaaaacccattacaacagaaatctctgtaaatcaaaaagatgtctgttccctaaccagtaccctactaattttgagtattattcaatatgaaataattccagaactaaaatataattggagcaagctcttaaagttgattataactggattgacctgcatgaaggctatatcccagaagagtgatctattatttttcagctttgactttttttacktcttatttttttaataaagtataattttaatttggagctttttaagtgcatctgagttatggttcactcatgtttgcaattaaaggtaatttttctctcgcagaatttcttcttaatttcttacaacagtttctttaatgtattaaaagaacactggattaggagttagaaaactctaaccaaagctctgtccttaacttgcgtgaccttgaacaaatcaataaacttctcctgatcacagtctcttcatctttatgaggaattaaaattagatagtatatttagttcttaaattctgtgattttattaactgtcacttgtttttacttttgactttaggttaatcagatcttaaaactcagtactaactaatgctgggaacttatacagagaagtctgctgagttgtggtgggaggacacagtttccatgtttgaacattagaattccttgcctcttaatcaagactgaagcattatctgaggaggaatcaggaagcccaattttatacatagttttaatgctagataaaaattaagtgtaattgtagcttagactagatatcatgatagctttcagccaagtgagggtgaaataaataaaatttgtctaaatagtactaattagagtgataaattatactttttttctaccctcatacatataatttgtggttgtgattcttatttgacattattggcatatttaatagtttccatgaattgaagagtcacatggctgtagcttataaatatatcatagttttctaatgtagcaattagaagtcttagagatattttgcaaatggtgttagaaagtcattgattatcatctgtataactagaactccatgaatcagcggcttatggctccagagcttaacacagtgcctggcacttaataaatatatgttaaatgaatcagtaaacatttggaatgtttatgtgtaggtgaagtcatagctgtaagagagtacaaatttatttgaaactcctttatatgggaagattaaaagtgaagttcatagtttggtttacttttgaatttattgtctgacaattttttctcactttattgcattaatacaatacaggggatgtcataggtataaatcacattgtagctaaacaaaaaacaaaagtggcaacagattcaatgcatgttatccagaattgcttttaccttttcttgcaaacagttttgagttttggtagtaaactgtttgaggcggtgaataagtacgtagtatacttagcataagacttaagaactctggcccttttgatcacttctttgcagcaaattattgtttgttgtgctttaaagtctccatttgtaaagaggaaatactacagatacacattaaagccacatccatcagtaacaagtacttattcaatttgagctggcaatagttcattaatagaactgatgtacttaaaagataatcagaatcgtcagtgtgctgttcacttactgaatgcattgactttctatattagttcttcagaatcttttttgggtcatgaaaaatatggacaacctacatagtgctttgataaaagttatgaccttcttttccagaaaagacatatatgcatctacacatgttttcatataatttcaagaaattttttgttargtcttctgaaactcttcaaagggggytctttgaccacatattcaggacctctgttctaaaagatgcacatgaacccaatctaaaactcggatcagaacaccgtgtttctgatttctgtattggtgtccctaaaggaattctctcccttgtgttcagattaatgccctcagttctccagtttcaccattcttacccaacatctgacctaactttatcttacctaatttctttgattatattaaaatgccgwggagaggattttttttaaagaaatagaaaaaaggacatacaaatttcaacccgtaattcacaaaataatttgcaattagttgattaaatggtatccactttttccagtagatggcactaggtttacattctttcatagcatgaatgattattgatattagcacataggtgcattgtgaaaacttaaacaaaagtatataaggaatagccagttaagaacatatggatttataatccacaaatttttctgcttatattatgttcaaacaatatttgtagagcacmaaacctttttccattttcaataagattctgactcccttatgcttggccatctcattgaaattgtctttcatgtgtagactttctataaactgaaacaagttttcataaattatcttgtatccaaatagctgatttaacagtcatttatagttttatatgcagctaaattttcttcagcagaccacccaagaattaaagaaaatttcacattttgttttgctgtgttttgaatttttatagaatcttgaaaatgttattagtttagcatgttgactgttaagcatgaatcgatttttgcatgaatgaaaatattttagaaaactaagaaaaattatatttaaaatgttgattaaatgagtactctgatgcagctatatttttctaaaacaaactgttttagtagccctataatataataaagttttagttaatgttgaaaagttgctgtgcagcatctaattaccagatgaacttttaattatctgtgacaatggatattagttaaggctaaattgttatacaacaataagactgtatgaataagatgttgggcatatggtttgttaagtgtggattctcttgattttctggtaaatatggaataaattctttatataccttaagaattataaaatacataacacctagtaacaagagagtttaaataggcatgaaaaaaacaattaaatcttagttttgtttgagaaattcattagttaacaatgactgtacagtgtgtaaaacataaattctgaaaacaaatgataattctacagggttagaatatctagacaatatgcactttggaggaatcatataggcaattagatgcttatttatctaaacatattcacaataatgttatgtgacagattgtagaaggatttattaaaatgagctaactcttgctctcaacaaacacaagtttaatgaaggaatgagccatgaatgacagctcacagattcagtaatattgtgggtagatatttgatgaatttttactatcatcctttcctagtttacaatttcatcctaaacattttatttagagattgaatttctcataactgcttctgctaggtatactgtaatttaacattctttaaaatagattgtattaagatgcaacgataaattatctgaaattaccttttgtgcctttgcatttgaaatcaacgatttacttgaaaattttaaatccttatttcatttatttcaatttcctatatatttttattttttaaaacatttagtatatttacgcttgtattagtaatttaaaaatgcgtgttataaaaaatacaccatgaggcctggcgcggtggtcgtacctgtaatccaggcactttgagaggccgaggtgggcagatcacttgaggccaggagtttgagaccagcctggccaacatagtgaaaccctgtctctactaaaaatacaataattagccgggcctggtggtgcgcctgtaatcccagctacccaggaggctgaagcaggagaatcgcttaagcccaggaggcagaggttgcagtgagccgggatcgtatgattgcactccagcctgggctacagggtgagactctgtctccatctcaaaaaaaaaaaaaaaaaaacccatgaaatgacaaaagatatcagttatttagatggttaataagagatatacttttatagagtttaaatttatgtattaacttttatgataagcatttctttcagtactagatgtatttattatattgagccacatagttgcaaggaaggaatggaatgttaatttttatcactagagtatttgaatttgaggcaagcaaagaaaattcagaatcctgtaactatagctttgtaggattttgttttgttgcagaaatacatgttagcgcagaaagataaaactgtttatattatattccacttgattaatgttttaatcttccttctgcaaattttagataatctcacagcaaatttcagagcttctcatcatattattggtattgatgaagaaagagattagacactgatctgtatttactagtttgtttctaccaccaacttgctttctggccccaggaatctttgttttgtaccttttattcctattctgcatctgtaaactgagaattttgtaacattcttgtcaaatcttttataaaagatatgaccttcaggtgagggttattgtattatattatattatattacatattagctgacattttccaaaagtttgttctgtgcaatttaagtgccttgttgtaagggagaagaaattggggaaaaaaagatgggggtggaagggaggacgccaaaaagtctgggaaatgtcatgggtttgatcaggcaaaatctgtttcagttatggaaagtccttggttcctgcaaagcaagctccagaaaggtagaaatttttgtctgtttagttcactgttacaattcagcaactacagttgtgtctatcacataataggtgttcaataaatatttgttggatgaatgaatgcttgtgaataagtaacatcatcttatatatcaaaataatgtcacattacaagtaatgtgatctctgctcttaagggatctacattctggtgagaaagatggccacctcaggttcaaattttattatctataggatgaaaggagttatatacttgaaggtttgacgattctatatgaacactttctcttttgttttaccattgaggcagggagtagaagaagtgagaagcattgtgcttctttcctcccagaatgtcagactggattctcggaataggatttcaagcaatgacagttcttctgaaggatattgaaggaatgtgtagatgtaattagtgggaggtggtaggagtggaggatgagaagatgggggtaggggtggattgtgggcacatgggttagcaatagataggtatggtagagtgcaaccaagcatgggttcaagagagaaacagaatggacaaataaactaaaggaggaaggctgcagacaagagaacctggctgtcattaaccaggtatgcaaccatgagtagtaacttttttgggccctgatttccttttgagggctttggactagaaattcatcatttcccaaattataatctgagggacactaattctactaactttcccttgtaaaatggatctcatcatgaaattgagaaaccctacatactaccctattgcataaattctaagatgcactgcttttaccattttaccatcttggtaatctggatgcagcttaaaaatcattgtgacaagaatgtattatagtttggccactttctccccgcctttttagtggagcataaaataatggggtatcaaatgaccacatatttaatagtgcacatcagcataagaaaatctctgagaaggtcttcaagaaacccatgtcacctagatttgcctaatctgatttgacagtggaacctttcccttctcactctgcaagaggaataacatgttagcatttttttcagagccagtgttttagagaatgcattttgrggaatgctggatcaggtaatcttatagtcttaaatccagagaattaatcaaatattagttataataaaagagttgaatgtgaaaccctagagaggtaacataggattcagagtagcaatctgaattactgaattaatgtttttactctatcattatttatgtttaaaatttcactgatttattaagcaaatgttattgttgctgtttttaaactaatttctaagaaacatagccaagatcattatttagaaaacatcttttagaaagaagatttaaatagcaataattaaagtggagaattgagtaagtatttaaatacaacatatacccgtttagtccttcctttttctcagccacattactaggtgctgrggatgcaaagatgactaaaatatgtgtgagcactgtctctcaagaagacattgaataatgtcttcccgtgtcagggcaagacatggcttttcttgataaatttgagtgaaaaagtaaagtggattttttttttctccagaactcctcagatttttctggaatatatagattcagatttagctgtttgttgagtggcaactgaagacttgttttctatgccttttgcttaattaatttatatttgaaatttgatttgggtggtaatgtaattttggaaatttgcaaagctgagtttttgacaatatatattttattttgtttctggtgaagtatactcaatgttacatttaaataaaatttgcatgataatctaagagagggctcctttccttcctttttgtgggtggttaccgctcatctccctagcagtcggtgctcccaaggggagaaggaggatgagagagcgagctattttttgcagatctttttgattgcatgtgaaatgtagaatggaaatgagcctgtctgtttttaatttttttttatgggctatgatgttctagtgaagacccatactggaaaaaaaaattaaaaacagggaactccaagtttgtcagacgtttcacatgcaatcagatagaattgaagtaaagtgactttctcttccactgttgtcacttgatgatggcagtgcctttaaaaattctcttcttatttatacgccttgcaagcaagaaaatgctctttggatcaagacattttaaaaatatttccctaaactctaggctttgtggtccacattaacacaaaaagtgttgctctcagtatttgcattaaattttgaagagttgataagatactctttagtttttttatggtgcttaaagaatactaataaaatgactactacacatgaattcaacaattaaaaatttataacacaaatgaaagatagaaaagtaaaatgtggcttctatcgtacagtcattcgggtgaattattaatgaatgtttcatcaggatgaatgtagtgctaaacttctattgtttcccaacaagaaaataatgtagcttcatgaatgagattttactattaaggttagaactttaaaggacgttaataacctttcagtactgtgaaaaatacatttactccccttgacttacagtaagaaaatgtttgcacatttttccccttaattttaaaactgccttacttctcagttccccaatttctcccttttcaaatctgaacctacattttatcctggtttcttttttggtttgttaaattagctgctactcttacatgaaagactgcatacttttcatcaggatagggtaatgaccaccttgacttgtgcacatttgatcatactatatctattgggatgtctagatgtagttttctgtttggatcttttctggcaccctgtgaatgctgttggtattatttgagttttctatatttcatttataagcagatatgattaaatctaggtgggaaaaattttaaagtgttaacatcctttttgttaactctctttacacaaaactttgcacatacctttactgtaagactgcacattgtatagattgtttttcttatctttcctgctaaaatatgtgttctcctagagcaggaacactaccttatttatttttaactttccagtgctcatcacagttcttgattcactgtagatgtttaataaatagttgtagaaagtataaattaatattaggctcaacagtttttatcttcaaagaatttacaatgtgtttgggaaaataaagcagaaatgaatgaagatgtttgagaataattgcataatactgtatttgcccatttaagtagtaccttgcagagtaaatacactaatactaaaagtgctgatagcggtgaacttatcaggatgtgtagccttggaaggaaaacttgcttgacaacgtcttctgagtgtatttattcaaaccttcagtatgagaaccacactgaaggccatttttatcattcaactatgcagcactaaaacatatggtcttgtttaattcaagaagtttacaatggtatgttgccttggcatgcttataatatccattgatgttaattagaactctgtgcatacatctatagaatataattgaaactgatctcgtggaattgtcttatgtgaagtaaaacagcaagaaggcattaaatgtgattattattatgacatataaagatatgatttttcttacatatagaaaagaacaaatctttaccttaagaagaaacaattatcttttttctgagtcctagaactcatagatttgtttttgtgtgtgttatgtttagggcttggagaacagatgaaataaaactgaaacaaaatgtaaaaattaagaatgttttttaaaaatagaacaggtactaattttatactttctttggttatggatgtttcctgccatggccagaagattactctgaaggggagagttactggagtgtttcagaagggcaacagcattgtttggccaaagggttttttgttctctaggctcatccaaaattcatcaccagaaacagccattgagtatcctctcagatataactccaagttgagaatgatgatctgtagtctaaaaaggatgactttaagtggacaaagcaaattagcagaacctgcactctgatcatacgttgaaagttcagccagaaaaatactttccgagagctattttgagggtagcactttgctaaatggatattcactaaactttctcttggaagtaaaaaaaggtaatgctaaacaatgcctgtattaagatacgtagttgtaaatttcctggtttaaaagcatatgtcttatatatttaaattgttgcttatctattcatattcaggttttagcactttcactgaggttacctgtctctgtctctgccactggaatatgaacttgttagtgttttcatctcttgcattgatcattcytgccatgtgttcggaaagctcttccttcagagatcagcacagacaccttcctctcctccttcagggctttgctcaaatatcacctcagtgagacttctttggccactctatttaagattataatccttattcctttcactcccagtcctccagttttcctttttccttcctgaatacttaccaccttctaagagactatataatttacttacttattttcattgtagtttgtctgtcttcccttactcctgctggaatgggagctccaggaaagtagatctaagtacttagatctatttagtactccaggaaagtatcctaagtacttagaatagtgccagcagataataggtactcaataaataattattgaactaatgtatatatcttacttagcatagtgtctgacactttgtaaacactcaacatttttgatgacttaatttaagaaaaaatcttggatcagtggtcctcaaagtaaaccctgcagctctagttttgtggaaaccagaggactgaagcaaaagtgtcctgacatcttagactgtatgttaatctcaggaatgtttttcctatatatgtctactttgagagaaaaatcagaattaggtatggttctacaaatataggagcttttcttcctccatgctttgtaggtttgtcttatcttaaagcctttattgaattactagaatgcaaacaaacaaaaaatgatagttatggtatatattttatattttattctaaaaaatggtctaaatttgacttttccaaatggccaattatttagaaattctaacactatactatgcctgaagtaaaaatttgcttagttttccagtgacaaactaataaccaaccaaatttacagtgaaaaataaagtataccacctttaaatatagcagcaaggtatttcaacatgaactttactgttttaacctactaaactcaaagcaaaacaagacattcttatctcttattcatttattatcttgggaaaatatttaatagtttcgttttttctgattctagaaccaaaattaaagttatgggatccttargttttgttttgttttgatttttcacaccgaaatataaaatttatgacttaaaagtactctaaggtttaggtaacagatctaatttacttcttaataggaagttaaaaaagcctttcaacgtttcatagactttgtgagaatcctgtatgaaacttgtcactgaccctatgttgaaggagtaaatacagggaaaagagacattggctaatagataaatgtatgtaacttttctgatgtactgaggtgattattactttttcccccttattattttgttagtttttaagctgaaagttattgtatagttagagaagaaagaagaaaagttgttacataatttttcctgacaaaatatgatgactggctgggtgtggtggctcacacctgtaatcccagcactttgggaggccgaggcgggcagatcacctgaggtcaggagttcgagacctggccatcatgtcgaaaccccatctctaccaaaaatacaaaaattacccgggtgtggtggtgggcgtctgtaatcccagccactctggaggctgaggctgaggcaggagaatcgcttgaatccgaaatgcagaggttgcagtgagctgaactcacaccactggactccagcctgggtgacagagcgagactccatctcaaaaaaaaaaaaaaaaaaaaagaagaagaaagaaaatataacaactatgagttttgcagtcagacagccctgggtttgagttgataagtctacttgctgtttgtccttaataaggtatgttataacctctccacgcctcagtttctgtatctgtaaaatgggcatgacagccacgttctagaattattgagaagattaaatgtatttatgtgaaagtgcctagacatgtgcctggcatgtaggaggactcaaattttagttttattttcttccttcatttcccactttaatcataaaaacaagataaggtgtgaggaaaatactgttcccagggaattattatagaaaaagaattaccaataaaagattgctgcacactaaatactggacctggctatcttttaaaatacaattttaacctcagaattcactgtaatcaaaatgaagtaagtgctaatggctgtgatccttatagcagatctttgagggtggcaacacatagcaaaggtgacttgcttcaggtcacgtggctgggaagcaggcagagccacaaagcaaactgttgctgtacgtttatttgtactaatagcaagagcttcatactggggcttcgaaacaatactggccttgaggcaacaacacaggacaagcttcgctataaaaagagactttggacatatttcaataaataaaatatccttggactatgttcaagatggaactgatctatctcaaagttactctgtaaggaacggtgttatgattagataccaaaatggcaatattatctcctcaaatatgtaattgtgttacatgtgtgtacacacacactcacttgtgccttcaaaagacactattaaacatttaaataaagggaaaaatctttcccaaacatacttctaagccaatttagaggtcattgaacagatgtcatataatactaatgttaaattaccctgtgtaataagaaaattacagtacctaagtgaagatagtaaagggaaaccatccaatgaattactccagaatttcaaaatgaaatgattttttcaagattaacagtggcaccatatgactttagaaaagtgagtctgatagggagaagggaaataagagacaaaagtgaagcttttctgtgtttatatataccaatatttggttctgatgatagaagggctaatgtaatagtatagctttaaattgtccaggaagtatattattattattaaatggtgtggcaagatatttattaaaatctgaccaacttctcattgaattgtttaatgtaaaatcacaatagttgtttctagtctacatatatttccttttggtattagatatactttgaaaacctaattattttgagaatatagtataaccaaagaatgaaaatgtacaaagtttgacaactttaaataatcactagtatttcttaaaggacaaacctcacttacagttaggaaacaatatttatacttaaggttgaaaagccaggatgtaaaaaaattttgctaatttggaagatgacctttaagtgcaccaaaaccaaataatttgtaggctatgacatagggcacattcctacaaaatttgtgtgaatactgctttagtggttcttgaaagacaaacaaagaaagctggaatgaaatctttattcccctcccaaataagacggagactaacaaaggagtacagcagcactctttcaaggcttgccattaaaacgaggtctctgtagcacagttaatgagatgtttcatagtggaaaacaatctgtttttaagaatgtttagatcaaaagtaatttctaatctatgaaataaagtctcttcaatacccttcattcactagtaaagcttttatgtttgtattatttacttcaatcagatgttttcaattttacctttttttcttgtacaaatacttgacatggttcatcaatactgaccaacggttttattctcttcggaaaagagagattcatgagagagggagaatgaaaaagagagaaacatctttgcctaaatgatttgcaagcatctgtgctttaagctactttttatgaacactccttagtaaatgactcaaggtaaaaaggcagaaaagcatccaatgttaggaaattgcaatccaataccatgtaatttaaacctgcagttgcttctcttgtactaaatgacatacagatgggtagcttagttctctcaactttgggaacacaattggtctttttgtatgaatgaacgtatattaacaaaaatattttggatagaattgtttgattttaattgtacatattttaattatgccattgaaaagaataattttaaccaagtcattttgtcatgttaagtttgcatttaatgattttgtgacagtattaactaagatacaacccttccaacaaacacatgagaataaaataatttttaagaagtctgtactgaattaagcagaaactcacctatcactgttgactgattatttaagaaagagccactttgcattcaagctattgagaggcttgttctgataggacagacatttctcagggaaacatttctacctaaccgttgataacagcaaaaatacaagtagtaggtatttggataaagcctaggataagacggggtccagtgagatgagagatcaacatgccattagtgacatgcctgctgtgcctgtggatctttgcaggccagggaagggctgaagtatttgtggaaggtcagcagaggtgctgtctgacaacctgcaggcccactccaaggtgtatcttgctctttggstctggcttgctcttttgctgcctccattttctcttgtggagaatcaaccgctctatcttggtggcccggattctgcaagctgatatccttcttcaacaccacagtcagggtaaccggctagacaatattttcctagtttaaggtcagcgatctcatactatgacattaggtaccttgaacgtaaaaaaaacgggaagcatttccactcctaatcatatttctttatatttcaaaagaagttgcgtttagtatttgggaaactaagcaagctttcttctagtaacttcaaaacatggcaagaactctctacatttaggaccatctgcaggcctctttcccactgtgatggatggcaaagaaaagcaattttactgcagtgagtaatggctaccctgtcctggagttatatttcttttcagtcatttgctcatgtaaaataaaatactacatataaacaggtgttgtctgaacattttactgcaggctgtataggttgaaataaaagctgccattgttattagaatcacattagaattatttcaccattcaaatacagttaatcagtaaagtcttcctagatatactttgcaaaaagaaaatgtaggtttctaaaaatattcacatttccttttttctttgtctttctccctttctgtttttcccactctttctttggaacttcttgaatctgcattagtgaaaatgccttctcctgtagtttattgaaagtttcttgctgcccatttaacatggtaagatacagtctttgaagagatatacagaatctttatactttgaaggagtatacagaatctagtgaagtttctgatggaatcatggagaacagtaattcctggtcatagaaaaatatatttttagggctcaaaaataggatggtagttaaatcatccacaatggaaatggaattttgatggtttcaggctattctactaagttgcaaaattattgcagacttacggtttaacataatatgcccatcattttatatatacagtataaatgtttgtaaatagacttatgcttttgaatttatttgaaaaaaaaagggtttcaggatactgggagttataaagcatgtaccttgtgaatgatcagtgaatttttagtatcacatgctagagactggctgtagcatattgtcactgctccagtggaatcatctgaatcttaagaaacattcattttaaacgtagagaaataatcagctgcagttcaggtaagcatttccagtgcattagagactggtctggtcattgacaagtgactgcagaagctgtgctgtggcggtcagccaaagcaattatttaggattcaagctaaaaaggcttcttctcccatatcctctctcttttcagggtcgtgtagggataaaaagaactgtaaggtggtcttttcccagcaggaactgaggaagcggctaacacccctgcagtaccatgtcactcaggagaaagggaccgaaaggtaaggtgagctttaataaaaagtcattaagagctagatttcttctccccctgccctctgcagtgcttttccttgccaattaatttaaagcattctatacttacttgctraagtctatgaattagtatccttgaaaaggttaaaatggtgttgtttaggttaagactaagttttatttgttcttttctccatttaatgaatactgcatatctgatataaagtcacaargcttttgttaagggcctgtttttagtttactacaaaatgtgtggaagtaacagcgatttaggtacattttttgggaagacatcacagtaagcaaaaccatgagggacttggcactatgccaggatgctgaaattttgaaggtggccattgtaagtatagacgttttggctgcaaaaagaaggtagcataatttagttcttttctacccaactccaatttctttttgaagcacatgtggagaaagtatttattggctcatttgtggttggaatgtcaaaaattttcaataactgccctcacatggctttggtccttggaagttcgccctaagtcctgaaaaaagagtttgttcacttccaagactgtttttagtgaataaagcctctctcagctgattccagctcaaaggtaacttgccaaggtccgacgactttgttgtctaatttataccatggagcttggcgtaagaccgtagcttacctctgatccaaatttattaatgatgtaacttcttgttttcattcatgaactgaaagagctctctactacacatgggatccctgttaacaggcaacactctcttcctgtcacagtatctactgtttactgaatttaccaaatgttgaatctctgacgaagtccaaccttagcatacaatgagctagcagtggacttcartctcagcttgygaggatttctatccgttctgttgtgtacatgactagcaaaatgatttaatgcacacaaacaaccagagattaggtcattcttaaaaattctgtttataaaaaatttggacctcataaagagggtgaaaggataataaaaacaagctgcagagcacatagactttttgttgggctagcacagctgatttgtattagctgaatgacctcctagcctttaagattgttaacttagaaaaatattcccttaaagctgcaatattccttttcaaaccaaaaaataagactccttccacttgaagtcttggacccttctgcattttctggtatatactcttgcacactgtaaagtagcaaaatcttatgtaatgttctttctgtgaatctaaactacaggcttttttttttaatagaaaaaaatctttttctaagcattacataactagatggcttgatttttttatgtaacttgcactagtttggagtagttatatgcacattttattatatagatttgaaatatattagtaaagttcagatttccatatgtttggtttgttttcattctagtacaaaaagcccttgaaagatttattagagaaatatattttaagcaaatacattctgtaagaaataatgctaactttaattttttaaatgatctgtttatttatcagtgcctttgaaggagaatacacacatcacaaagatcctggaatatataaatgtgttgtttgtggaactccattgtttaagtaagtatgttgaaaacctataggtatggctgtatcatagatggcagcaaactagttattgctttttcatcttagaatctttccattgctgaattttcttctgtttgtttttctatttccatttacccccaacaaaacaaaagtaattattgatttcatggtaaattaccagtgtgacagactggctgattttgcactacttggatctttaaaatacccaacattaacttgttcatgtcagtaaccatggtgcttagcagagctgtgaaagagattttggcaagcatagaaatgtttatgcatttactgattttttaaatcttcaaatgacagccttaaatatttattggaacataatgaaaagttcttcatgtatatacttcacattgaataaaatccaccaagtagattatacttttgcaatgaagggaaatacctgtattgaatgtaacatgggaacatacctttacataggtaagcaaattatgtaatatgaggttaacagtttttgcatagattcaaaatctttattttaaagatcccaacagtttaccataaaacaggcagcacactggactttctgactaaaatagttcattcagatagtgtattctggagattatggatgttattcaagaaagggaaatctttaccaaaaacttatttatctaggtggagaaaattctagaagccctatgcttcccatgggttgctgacttgggggaataaaaaggcagaaaccttaattgggagtaaatgtcattggctgggtgtggtggcccaggcctgcaatcacagcactttgggaggccaagacgggtgcatcacttgaggtcaggagttcgagattagcctggccaacatggtgaaaccccatctctactaaaaatacaaaaattagataggcatggtggtgtgcgcctgtagtcccagctactcgggaggctgaggcaggagaatcacttgaacccaggaggcggaggttgcagtcagccaagtgtgccactgcactcaagcctgggcgacagagtaagattccgtctcaaaaaaaaaaaaaaagtaaatgtcatttatttaaaatggaattacagagtttcttaggggaaataaataaacaaggatctgatacttgtagctaaaacacacttaatatctctccataaatgtttctcttttaaaaaaccagcatttactgattttccagaaataacaggaaacagtggtttccttgaaattaaaaaaatgtttcttacattgcacaaaccttattgaacattaccattggttgagaatctgttctgaattcttacgtattccttctgttaaaaaaccgacccttcaaattgtcacccatttcctctcagaaaacacactccgtatataatgtttcaacacctttagcttatgtcataatagttgatataacacttaagatagttgctgagccatgttaaacttgttaatatcccaaatggtaaaaattggccacatcccctttactttttgattcagattctccatccccttccctaccatgtgattcactaaagtatgggatctaaagaaaacttactgttttaaataagaaacagaaccactgtaaatgaagggtttaacccttgtgagatttttgagtcacaaatcctaaaagcaagacccttatccaaacatagatgctagtgggagtcaggtttcacatttgatgtgatattgcctctatttcatctacttctgtgcttacaaggagagcttttattttccacatttataaggaatgtgatttaatactttcattctacttttttcttcttttaattgtttgcttcttttttacttgctttcttgtctattttgggaaaaattccttgctgtatccttcactggagaatgtagtcgagtagctcattggtctagtgccaacttctgtatgtgtactttcctgaaactgatatgtctgagagtctgtggttggctgcgtcttcctcccatctcctctatcatgaccacccttctcccacctcacaaaagatgacatacctttcacccagcccaaatcttaccatgtattgccctggggtacaatctccagggcatcaaacaaaatgacagttcggcaactttaaagagactcgaaagcaaggttaaaaaagtgttggtaaaaaatagtgaaatcgtatttcaccttggcaaggctcctggcacagcacagtccacctccctgtctgcctgcttgtctgtctctccatctgctgactgtccattcattttctactagcctacttaagtgagaaggctgccatgagaacatgtattcatatctttattcaaatgaacaaaaacraaataattggaagtctttttttcggacacagaatacatccgatttggttgattaatttgacagtgaggactggctttgtaaattatatggtggacttcatctgctcagtgatctaaatatgtatctctaaggttttgtcaaatctacattttacgtatgtgtaaagtacacaaaacaccagaaaattaatcttctgcaatttaaaaaatttctgataagacattttaacttaatttaaatatatgaggaagcatgtatcagtcagcacccagtcaggacacagaatacacagtattttgaacagtaaggtttacagaattatgaactgtaagagaggattgtggtaataagggattgggtagtaagaaatgaaaagaaattctaaagaatacaggaatagcagacataagaaacaatcatgactcctaggaactgagatagacagccctaggaatcctctgcacccctccgtacacacagggctgagggctagaccttgttggagagggcatggctgtwgccactaaacagcagagaagttgttatggtgccatgatggtgcaacttgctggagctttcctgaaatctgaaatttgctggaaatttaccctctgggatgctggggaaagctgtttgcagggcatctcagtggaggcrctccactaccaaaccatgtgagcggagcgccaggggaagctgctagccgctgggtgctgctcatcgctgtgcacagaaagcagcacctggcactgaagaagccactcgtgtagctggaaagcagagtatgctacctaagctgggtgcagaaggagctgtgtgctctgcaggagttggttgctggaaaagctgcgtacacgggaggagatgggtgcaggagagtccagtcacataacaggagcctggcactagagaagctgcccacattgcaaaagcctggaagcagagaaactgcatgggctgtgggatctggatgtgaaatatgctgcaagcactagaggagcttgttaagcaagcatcctgaaaccagaaaggaaagggcttttgctcctggagtctgtctcctgtgccctcagctggcaaagttagacctcatgctggctgacaaagaaagaagtatttaaagggcccagccccattttagcagagcaggcaaagaagatggatttagaggcgagaggctctaactttatttgagcacaaagtctattttttaatatcaaaattcttttaggggttcaggagcaaaagtttcaaaaccactcactagtctagtaaattaatgtcactatcaggggccctgtaggtaattggttttatgctttgaacaaaagtgtaggaaacaattgaggtgtgtgtgtgtgtgtgtgtatgaaaagtgtgtggagtttccgtttgttagaaaggagtgagggtagaaaactagacagaacagattaactagaggaaccgtatgagaaatactagtgggagggaaatagataatacagaagaaataagaagagtgctgaatttcaagtatctaatcacaccggggcctgttgtggggtggggtgagtggggagggaaagcattaggagatatatttaatgtaaatgacaagttaatgggtgcagcacaccaacatggcacatgtatacatatgtaacaaacctgcacgttgtgcacatgtaccccagaacttaaagtataataaaaaaaagaaaagatcatttcccccactgctatttctgttattttattcacacttaaagtatatgtgtgtgtgcatgcatatacgagcataatcctcatcatttacttgactgctgtgtgtattttacttcctcacaaaaaaggctattcaattattctcatttcattttcaaacttgtactctaaatacatttcctctctgaacaatatactgctttcttactgcttaccaagtacaagaacctcattcacagccttcttataaacctaatgtataatttattccatggttcacattttcttcacatttacaaattttaccaagctagtttatttctcatatagtactactgactttcagttagtaaattaactgacagaagtaagaatgttttctcttctggttatttgaacttttaaaacttcataaagtgaatttattgcacatcagataaaccaaagaaaacactgggaaaataattcagaaagtatttttgaccatttatattttgctttggttgacactttcctaggtattgtggaataaataaaataaatttatgaaatatttttttcctcaacgtacttacttttttggcatagtaagaaaaacacaacaaaccattataaaatatgacaaaataatgctagtgtctctctgaatgtgcctgtttgaaatgcttttgtatgtaataggaaggaatatgactacatcaaactcaggcaagacttcttgggggagatgagaacacactttaccaggccaagagaggggttcagtttttcccaggtggaggatgcctagtagagaataccatatgagaagaggaatcagagatagaatcaaaagtggatttttcaaggatatggaacactagtccaataggagtgggaaggtgggttatgttgggagtaatgggaaatatggctggggagttacaggggaccaattaaggaagtccttggatgccagagaaggcatctaaattcctactagaaatcttttaagccttggaatcttttcctccataaagccctatctgatccttctagtgtgaacgtgaatgtccctcatctctgctccatagcactttgaatgcgcttccatcattgcaatttctactttgttttataattatctgtctatgtgcttgtctaccctcttggagtgaatttcacaatggcaaagccataccttagtcatatttatatttatagccccggcacataataatcaccaaatacgtagttgttgatcacatgcatatctgaactctgttagatagatagtgaggtaatagcgtgatgaaaatgagatgtaagccataacagtgcacaagatagattctgggattggaaaaagaaggaaatagggatgttaattaacagcctcagtgggaactcttttttttccttgttagcggataaacctcaacactatgcatgtgcaatcagcttctgataattttgtttgagaccttgaggaaccacataggacattttaatattttgtatacacttattcagcaggccttccactgaatagctcattttytataggttcactaatgataatgataataatgctaaaacaatagctaacacttactacagcacttaccatatgtcaggcatggttcttagtgcttcatatatgtgaactcatttaatcttcacagcaacacattttatagatgaggaaactgagagaggataagtaacttgtgaagatcacacagccagtatacaaatggatttagaatagtagcactcaaacatttaaaaaagaagaaagttaaagaattatagtagaatgaaattttaatattttattttagtcactctggttatttcacttagcatcgttggaacaaatggaacacacagaaacatgcatacacacacacacacatctctcaattgtttgaaaaatctgtttgtcacagtacttaagtacttaagttgaaagttgaaaagtgtctcaatgtgggaagggctagcccaaaagtaatgagatccatcatggcaggtcatcaagaaggactcagtttcaggcaggttattatctgtccttagggaagtcccttggaatcctgacaagaaaatggagccaatgttcaggaagtcatcaggccattcaacatctgggagctagggcagcagctggatttgtgggcaggattttagtaattgaaactgggaggtcattttattttcacttattgactccctgtcacattttctcaaatagctgcattccaaattttcactaatcttttctttaaaaaaatcctctctctacattttttgagaagattgatgccaactgacacgaactattgtaaatgtctatcttactactggaaatttttgtgtcccttcatctttatcaaacaatcagaacaggcactgactaacagcagctagtggcgcctgctgaatatcaggccagatgtgtgatctcagattcatcacctgtaaaatggggtaaataacaccaaacaggtgtaaaaactaaatgcagaaaaatgcctcgaatatgccaggtattcaacaaatgttaaatacaagtggcctgtccaagttttgggaacatatcatactatcacagcagcctaaaaaatccttacaatgtgagaaagtacaggctttattagacagggtctgtctgttaacagtggatattagtgtgatgagtcacagctccagctgtgttgctacatttcaaatggaactctgctgcaagactgttcacacatgctacatttcacatgagcctcctgtgcaattttattctaggctaccagaaaatttaagccatttttcagctctttaagaacataagcyctttcactgagaaaattccagtccagtgccacacacagttcactcaactgtgctacttcatgcatgctattctgttcaccactaaaagagactttcaacatgaacttttccctctgtgatgcaattttgtgtgtgtgtgtggcgggggaggatgtaagagcacagtgagaagataagagttttcccgttttcctctctactcaaatcccgtctcctcaacccttttaaaactctccttacgatatttaacaaccatttcagtcactgtggaattctgttatggagagtaacatgaatttaacttaagctttcttttgtggaactctagctggaaattgctcataattccagaaaatgtttcttaacctctaacgaagtacatttaacttgaattttaaaagatttgaattgcctctcaccttattcaaaatcctttaacgaagaaagctttccagtataaagaaactgttctgaaataaactagagttctgagtggtggcttacttaaagttgtgttatagctgagtaagtaatatattattttgaagagaatataaaattgacttctctcagcccactgacccttcctgtcttgtccccatacaatgatttataggaaaagtatttgtaatacagacagttacttttctatcttcaactcaactgaaaactcagagaaaaactacagctggattggaagaaaaggacttgcttgagacagggagtaaaaacacagccaaagcatgactttagaagaaagaaaagaacataaaagcttggcataagaaaaggaaagaacaactccatttgagaaactagaaaactatcgcaaggcatgactcaaagtataacaatatacaaagataattataactgcatttttctttttaaaaagttatatacacacggaaaagaactgaagcaatwgatacaaaaatacctaggtgtgtgaagttgtgtgtgtatgtgtattatttggggaaaggaaagtgaggaaagaacaatcttgccttgcctcgtattacctaaataacaatcttagttcttcagttaattttccaaatggattacatttttcacagtgaattagaatggatagttagaataaactgggaaacataatagggaaaacttttaactgtaattcatgtacatttatcttgtttgaataaacatgaatcagaaaattaatattattccagtttacaaactttgaaattacttaaaggcagtttataaaaaataatgtgcaagttttagcaagtacttcagaggtaattcacaaagctttttttgtaaatgaataattcttttattgaaaaatagttattaagaattgcacaaattttaatcagatagatatcttcagtgtgttttacacgtggataaagaacccatcacataacattgtcaaacaaagatacagaagccatccagctcaccagttggaaacatcgtgtcttaaaagttttagcagaggctgggcgcggtggctcacgcctgtaatctcagcactttgggcggctgaggcgggcggatcacgaggtcaagagatcaagaccatcctggccaacatggtgaaacctcatctctactaaaaatacaaaaaattagccgggcgcagtggcgggcgcctgtagtcccagctactcgggaggctgaggcaggagaatggcgtgaacccggaaggcggagcttgcagtgagcggagatcgcgccacagcactcccgcctgggcgacagaacgagactccgtctcaaaaaaaacaaaaaacaaaacaaaacaaaaaaaaaccaaaaatcagctgggcatggtgatgcatgcctgtagtctcagctacttgggaggctgaggcaggagaatcgcttgaacccgggagatagagatggcagcgagccgagatcacaccaccgtactccagcctggtgacagagtgagactacatcaaaaaaaaaaaaaaaaaaaaaaaaaaagtttcagcacaaatttgttgcataaccatagtcaagttattttaactttctatctcattttttttcagctgttaatagtgagaataacatcaactgtttctaattcataaccctaccgtatcgaaggaaaggatcacagaaacatgctagaaaagatataaagttggaagtataaagtaagatttgtgaaaactgccactttaaataaatgtacacagtaagccataaacagcatgcaaatctgaagttctcaaaactaagtcggtataactggcttttgatgtcaacattattgcatattttataatatattatttgacacagtgatccatctcatccaaaatatttctggtttctgttgaataatttaaaaatattttagtgtggattttaaattctccaaattatataacttacatgagtaactcagagttttaatacatttgtcatttgcaaatctctctccccaacaaaactatgaactttttgagataatagattatgatatagggcttttgtagcccccacctctactccattacacgggcattggattttgcaaatcctaggtacttgactatttgttaaataaatacagtttaatcctgataagaataacagcaataacctgcctgaaaatgattcaagttgacactaagatggcggaaatgtaaatagatacttggtactggattcccataattattaattccctgccatgttttctgaataatttttttttgtattttctgatttctgtggtgcaaatgcttctgctgtgggctatttcaagtacagatatgacatcactaaatgtcggtttgggaagggacgtttggtagcaccattacacagtattctgtaatacagatatgacagttgtaaataatgtagtcaaatgtagttaaataattgggaagtggtgaattttgaatatttattatctttgtttttaatatactactcctggaacttacttttggtagatgcttgttacaacaatagcattgcttgcaactgtaaagttgtacctgtctcacctaagggagtgatgacgacgtctatggctaggacctttaacaacaaaacagtaaatagagcaaaaagtcacaaaaaataggatcaaccacccaaagctacattagaagaaaaattcatagtcgagcctttttattatcaaatataagaacgattaaaaataatgaaactaaatcttcatctcaaagtgctagaaaaataacaacaaaatcaataaaagaaattgggataaaatgtccacgtttttcctccaggcatttgccaattctaggcatgagaagagaggtaaagattccaggctgggcgcggtggctcatgcctgtaattctagcactttggaaggctgaggtaggcagattgcctgagctcaggagttcgagaccagcctaggcaacatggtgaaaccctgtctctactaaaacacaaaagaaattagccaggtgtggcggcatgcaccagtagtcccagttacttgggaggctgaagcaggagaattgcttgaacccgggaggcggaggttgcagtgagccaagattgtgacactggattccagcctgggtgacagagcaagattctgtctcaaaaaaataaaaataaaaataaaaagattccagacattccagacagagacatactgctaagaggcagacatactaacagaaaggtgtttctcagcctcagctctatttacattttgggatggacaattctttgttgcggggagctgccctatacattgtaggatgtttagtagcatctctgaccttccactagatgccagtagcattgtccccacttcttctgcacttgtgacaaacaaaaattcctccagacattctcaaatattccctggggcaaaattgtctcttgttgagaacagctgatctagacaaccaacagaatggtaaatctagctctaaatcaacaaataataaatcaaacactgacttttagtattttctgatttctgtggtgcagatacttccactgtgggctatttcaagtacagatatgacatcactaaatgtggggttgggaagagatgtttggtaacaccattacacagtatttctgtaatacagatatgacagttgtaaataatgtagttaagtgtagttaaataattgggaagagatgaattttgaatatttattttctttgtttttaatataattcatttaattataaatttacgtaatttatttttaataatggctatgtttagcagctagctcaacaggttccttaaatgataacaatagattctcctaagcttcagcacaccactgtaatgggggcaaacaaaagatagaccaaacttaacaaaaactgcaatccagcctccagtcagctcagtccccaaattgattaaggtgatctttcacctcctttccccagtctagctggctatcagaggataggatgaaccctctctggaagaagattaaattatctggagtgcaatttttcatgcacaaagcctggcattcataaaaaattaccaggcataccaaagtacaggatcaagggaaataaattgacaaaacaaacaggtttatacacagcccagatatacagatatttaagttaggctttaaaataactgtgattaatatatccaagaaaatagatgacaagatggagaatttcaccagacagctggaatctattgtaaagagttaagtagttttagggctgaaaaatgcaataactgaaagtataaacacaacagatgaatttaacagcatattagacacacaagaaagtaggactggcagacagcaacagcaaaaaacaggttagtagaaaatatccagactgaagctaggagggcaagaaaaaattatagataagaaatatgtttcagttataacatgtatataattagagccacagaaagggagggaaaagaagatgggaaagcaatatttgaagagataattgccaagaattttctcaaactcacaaacttagaaaaaaacttcaagctacagattgagaaagtgcttgaaatctgaaacaggatgaataaccatatcttattatatcacactgctaaaaatcaaaggcaaggagaaaatcttaaaaacatccagataaattaacatgaaaaataaaaaatgtagaactgttaaataaattctagaggttgatctttgaaaagaccaataaagttgaccatttctgtcaagtgtagtcaagaaagaagggaggaaaagtataatgtttaaaacactagaaatgagaataagataaaaccacagagatggaaaaaactattttaacgtaagagaatactatgtataacccaattctaataaattaaaaatctcagtgaggtgggtaattttctaaaaataaaataatatacaaaatttgactcaggaagagttacaagacctgaatagaccagcaacctcagaagaaattgagttatcacaaaaataaattattcctatgctattataaactgtatcaattaaagaaaatagaataaatcttatcaacttattgacaaatgtaaagtactcctaaaatcaagatctgataaaaagatattcaatcaaagaaaaactatagacctatctgatttatgaaaataaaatgcactcacattttattgcagcactgttcacaatagccaagatttgggagcaacctaagtgtccatcacagacgaatagataaagaaaatgtgatacatatacacaatggagtagtattcagccataaaaaatgagattcagttatttgcaacaacatggatggaactggagttcattatgtgaagtaaaataagccagacacagaaagacaaacatcacatgttctcacttttctgtgggtgctaaaaattaaaacagttgaactcatggagagagagagagagtagaaggatggttaccagaggctggaacagttggggggaagggaggatggttaacgggtacaaaaaatggttatgaagaacaaaaaattgaaaaactaaatgagacctagaatttgctagcacagcagggagactgtagtaaaaaaataattgtacattaaaaaaaaaaaactaaaagagtataattgggttgtttgaaacaaaggataaatgcttgcagtaatgaccccgatgtggtaattatgcattgcatgctggtatcaaaatatcttaggtaacccataagtatatacctactatatatccacaaaaattaaaaataaaaaagaaaatagatgtaagaatcttaactaaaatattagtaaaaggaatatagcaatatgttgaacaagtaacatgtcatgacaaggtaaggtttatttcagggatgtacaaatggttcaatactgggacatcttaggaaaaatataatcattttaatatgtactcagaagagattttatacacattcaaaatgtattctttaatttaaaaacctcttagtataaatgaatactatgtttcattaaatctaagaagtcatttgtaagggtatagaagaaaaaccaaagtgtttttttctgttgtctctcaccactcaacactactacaatacaagttctaggggaaaatagaagtgggaacttgtataacactggggtgatgtaggcctttctaaacaagattcccaaagcagaaataaaaagataaaagacattggattggactactaaatattttacttttctatagctcaaaaacaccatagagtatattattaaaaaaaaaaccaacagcagtggcaaaaaagcaaactgggaaaaatatatgcaatccatttgatggacaaaagattcatatcaaaatcaattgagaaagacaaacctcagaaaaatgggcagaaaatataaacagatacttttcagaataagaaatacatatgatccacaaacttaggaaaaaatctttcacctcttaataataaaaaatgaggtaaaaagatgaataattttttacctaccaaattagtgaagatttccaatattgtcaaattaagtattggtcagagtataggaaattagcactttcaaatactacagggtagagtgtgaattggtagtacctttctggatagcagtgtaataaattattaaaagtcttagaattctgcatgccataggtctagcaattacacttctaggaacttattccaaaaatcatttttatgcataaagatatagctacaagaatgttcttaatcattcttcttatgatacaagaaataatttcaatgtccaaaataggagtctatgtaaatgagctatatggtgaaaatatatctgacatttcagataatagtgcaaaagaacatttaattatctggaaagagatttaaaatacatttataagtctaaaagagtattaacatatgatcccatatctatgaaatatgcatacctataaatatatgcataggaaatagtttaaaaggttttgtaccaaatgttaacagtagttatctctggatggtgcaattataggtgatttttaaaatctgtacttttaagtttttctaaaattagcaagtatttatagggtatcagaaaaacactaattattttaatattacctttgctcaatgtgttacaaacactgaacaatttattttaaaaactgactttaaacacatcatctctctatgacaaaatttatcttttcccaataataatttgaaagaatgaattagaatgtagttccacatttatttttaaaggccaaaatccatattgcccatctactcacattcgtggtagatactttgcccactgccatctcttctaagttgttgctgcttctttccttttttatccctaagtgactggtaatggtgatgacttcctaatgaaaggtagccaccggaagcttaaactgcttaaaccttctggtttcaaattttctccctcctcatgactaccttccatcttcctgtagcacttacactgtcctattcccagaagcctagaggcaatcaatgaagggcgggacaccaaagttagatttgcatttattttcaaatggattgattttttttaactgtttatcatgtttgaatattttaaaattgggaatattttaaagccaccattggttgagaaattaccatgcattttgctaagcactttaaagaaaattgtctcctttattttttacaacttaaatagaaaatcaaagctcacaaagggtatgtaatatgctcaaggtaacacgggtagtaagagatggagctaggacatagattcatgtctgtctggcccctaaggcacccttccctagctcaatattatgttataatgcttccctgtattctggctgattcttctttttgctgagtaattcaccatctggtagctatcacactctggtgttaattggtgctaattttctgataatggccaatgactatacttggattttaaagtggaaaaagctatgattaaggtgtaatacatgtgaggtttaaagtcacaactttccccactttactgtgtgtgactttgaataagctacttaacctctatgagccttaatttcctcgtttgtaacatgaggataatacccttgtcacaagaacttttgagaggattaagtaaataatgttgaaatgttttgtaagtggaaaaaacactgtaaatgtgaagcattgatactgaacagtgtaaggattggtatacacagtagttttcagaacaaaggttcatcagtgaaagggaggcatgctgcttgttggaatagagactggagatctattaggtaagtactcctttaaaattctgggaaggtttgtttgtttactgcatcatattctgttattggtcatattctgggtcagttctggttattgccgattggtgttgatgataactggtaataatttgctgcaggggtgggtggggaaaagagcaattttgcttatttagagtaaaaagagatctagagaaactcaggagacaatggataattgatagttttaatagcttaccaaatggccagcctacatccagagcactgtgtggttcaatatgagaccctcactttaaaaggtttatagacataaagtggtatgtgtattattttttcccagaactgggtctttttctagattttcacctgtttggtgcttaggtcagtgcttcccaccaagacagctttgtaacagtgatgctttttcaatgtggaagtttatacggtgtgaagagacatttttttacttccccattgggcaaaaagctacattcagggaagagcagctgatggttaggagactcaaaaccatgtcactttgaaaagacaatggaagagaactgaaaaggcttagctcaaggggaaaagtcgtagagctgtcagggtctacttcagtaatttgcaaacctcactgtccattaraaccatacattccaagtctctcctcaaagttctgatgtagcaagattatagtggattctagaattttctttttaaaactctcccataattcttatgcttggttcccatgagtccaggcgaaggttaaggaagccctgccttagggtgatgtcagtagtcatgcaacaaacactacaaacaataggcatggagagctgaaaagatttatcaattgtctgaatgcgagattggtgaaaagctattcctaaagattaatttgatgtttaaaacctagtttggaaaggaagatgatgaattcagttttggaagcctgatagatttgagattttaacataaaatttcaggtatatcagtcttccccaaagtgtgttccactgaatatttgtttcatcagaccattacatctacataatgctagtcccaggacatgttgatattgtgttctgtgaaaaaaatgagtgtcattggactaggaaaataaaagatggctcattgggaaacaccgaattaaaataagtcaaatggttgctttatcataaaactcatggagcctacaacacactaatgttcattgtagagctccaggagtaatacatatgtagcactttcagaattttttcaccacagaaaatttttataattgacgaaatgttgtgaagctaatgttcctgataacacacgtaggaaatgctaaagtagataaggaagatcttttttttattattattatgctttaagttttagggtacgtatgcacaacgtgcaggtttgttacatatgtatacatgtgccatgttggtgtgctgcacccagtaactcatcatttaacattaggtatatctcctaatgctatccctccccactcaccccaccccacaacacgccacggtgtgtgatgttccccttcctgtgtccatgtgttctcattgttcaattcccacctatgagtgagaacatgtggtgtttggtttttttgtccttgtgatagtttgctgagaatgatggtttccagcttcatccacgtccctacaaaggacgtgaaatcatcattttttatggctgcatggtattccatggtgtatatatgtgccacatcttgttaatccagtctatcattgttggacatttgggttggttccaagtctttgctattgtgaatagtgccacagtaaacatatgtgtgcatgtgtctttatagcagcatgttttataatcctttgggtatatacccagtaatgggatggctgggtcaaatggtatttctagttctagatccctgaggaatcgccacactgacttccacaatggttgaactagtttacagtcccaccaacagtgtaaaagtgttcctatttctccacatcctctccggcacctgttgtttcctgactttttaatgattgccattctaactggtgtgagatggtatctcactgtggttttgatttgcatttctctgatggccagtgatggtgagcattttttcatgtgttttttggctacataaatgtctccttttgagaagtgtctgttcatatccttcacccactttttgatggggttgtttgtttttttcttgtaaatttgtttgagttcattgtagtttctggatattagccctttgtcagatgagtagattgcaaaaattttctcccattctgtaggttgactgttcactctgatggtagtttcttttgctgtgcagaagctctttagtttaattagatcccatttgtcaattttggcttttgttgccattgcttttggtgttttagacacgaagtccttgcccatgcctatgtcctgaatggtattgcctagattttcttctagggtttttatgattttaggtctaacatttaagtcttcaatccatcttgaattaatttttgtataaggtgtaaggaagggatccagtttcagctttctacatatggctagccagttttcccagcaccatttattaaatagggaatcctttccccatttcttgtttttgtcaggtttgtcaaagatcagatagctgtagatawgcagcattatttctgagggctctgttctgttccattggtctatatctctgttttggtaccagtgccatgctgttttgttactgtagccttgcagtatagtttgaagtcagatagcatgatgccttcagctttgttcttttggcttaggattgccttggcaatgtgggctctgttttggttccatatgaactttaaagtagttttttccaattctgtgaagaaagtcattggtagctttatggggctggcattgaatctataaattaccttgggcagtatgggcattttcacgatattgattcttcctacccatgagcatggaatgttcttccatttgtttgtatcctcttttatttcattgagcagtggtttgtagttctccttgaagagatccttcacgtcccttgtaagttggattcctaggtattttattctctttgaagcaattgtgaatgggagttcactcatgatttggctctctgtttgtctgttattggtgtattagaatgcttttgatttttgcacactgattttgtatcctgagactttgctgaagttgcctatcagcttaaggagattttgggcttagatgatggggttttctagatatacaatcatgtcatctgcaaacagggacaatttgacttcctcttttcctagctgaataccctctatttctttctcctgcctaattgccctggccagaacttccaacactatgttgaataggagtggtgagagagggcatccctgtcttgtgccagttttcaaagggaatgcttccagtttttgcccattcagtatgacattgcctgtgggtttgtcatagatarctcttattatttgcagatatgtcccatcagtacctaatttattgagagtttttagcacgaaggttgttgaattttctcaaaggccttttctgcatctattgagataatcatgtggtttttgtcgttggttctgtttatatgctggattacgtttactgatttgcgtatgttgaaccagccttgtatctcagggatgaagcccacttgatcatggtggataagctttttgatgtgctgctggattcgatttgccagtattttactgaggatttttgcatcgatgttcattagggatattggtctaaaattctctttttttgttgtgtctctgccaggctttggtatcaggatgatgctggcctcataaaatgagttagggaggattccctctttttctgttgattggaatagtttcagaagaaatggtaccagctcctccttgtacctctggtagaattcgactgtgaatccctctggtcctggactttttttggttggtaagctattaattattgcctcaatttcagagcatgttattggtctatttggagattcaacttcttcctggtttagtcttgggagggtgtatgtgttgaggaatttatccatttcttctagattttgtagtttatttgcatagaggtgtttatagtattctctgatggtagtttgtatttctgtgggatcggtggtgacatcccctttatcatttttttattgcatctatttgattcttctctcttttcttctttattagtcttgctagcagtctatcaattttgttgatcttttcaaaaaaccagctcctggattcactgattttttgaagggttttttgtgtctctatttccttcagttctgctctgatcttagttatttcttgccttctgctagcttttgaatgtgtttgctcttgcttctctagttcttttaattgkgacgttagggtgtcaattttaaatccttcctgctttctcttgtgggcatttagtgctataaatttccccctacacacggctttcgatgtgtcccagagattctggtatgttgtgtctttgttctcattggtttcaaagaacatctttatttctgccttcatttcgttatgtacccagtagtcattcaggagcaggttgttcagtttccatgtggttgtgcggttttgagtgagtttcttttctttttttatatactttaagttttagggtacatgtgcacaatgtgcaggttagttacatatgtatacatgtgccatgctggtgcgctgcacccactaactcgtcatctagcattaggtatatctcccagtgctatccctcccccttctccccaccccaccacagtccccagagtgtgatattccccttcctgtgtccatgtgatctcattgttcaattcccacctatgagtgagaatatgcagtatttggttttttgttcttgcgatagtttactgagaatgatgatttccagtttcatccatgcccctacaaaggacatgaactcatcattttttatggctgcatagtattccatggtgtatatgtgccacattttcttaatccagtctatcattgttggacatttgggttggttccaagtctttgctattgtgaataatgccacaataaacatacgtgtgcatgtgtctttatagcagcaagatttatagtcctttgggtatatacccagtaatgggatggctgggtcaaatggtatttctagttctagatccctgaggaatcgccacactgacttccacaatggatgaactagtttacagtcccaccaacagtgtaaaagtgttcctatttctccacatcctctccggcacctgttgtttcctgactttttaatgattgccattctaactggtgtgagatggtatctcattgtggttttgatttgcatttctctgatggccagtgatggtgagcattttttcaagtgttttttggctgcataaatgtcttcttttgagaagtgtctgttcatgtccttcacccactttttgatggggttgtttgtttttttcttgtaaatttgtttgagttcattgtagattctggatattagccctttgtcagataagtaggttgcaaaaattttctcccgttttgtaggttgactgttcactctgatggtagtttcttttgctgtgcagaagctctttagtttaattagatcccatttgtcaattttgtcttttgttgccattgcttttggtgttttggacatgacgtccttgcccatgcctatgtcctgaatggtgatgcctaggttttcttctagggtttttatggttttaggtctaacatttaagtctttaatccatcttgaattgatttttgtataaggtgtaaggaagggatccagtttcagctatctacatatggctagccagttttcccagcaccatttattaaatagggaatcctttccccattgcttgtttttctcaggtttgtcaaagatcagatagttgtagatatgcggcgttatttctgagggctctgttctgttccattgatctatatctctgttttggtaccagtaccatgctgttttggttactgtagccttgcagtatagtttgaagtcaggtagtgtgatgcctccagctttgccaaaatgtaaagaccatcgagactaggaagaaactgcatcaactaacgagcaaaatcaccagctaacatcataatgacaggatcaaattcacacgtaacaatattaactttaaatgtaaatggactaaatgctccaatgaaaagacacagactggcaaattggataaagagtcaagacccatcagtgtgctgtattcaggaaacccatctcacgtgcagagacacacataggctcaaaattaaaggatggaggaagatctaccaagcaaatggaaaacaaaaaaaggcaggggttgcaatcctagtctctgataaaacagactttaaaccaacaaagatcaaaagagacaaagaaggccattacataatggtaaagggatcaattcaacaagaagagctaactatcctaaatatatatgcacccaatacaggagcacccagattcataaagcaagtcctgagtgacctacaaagagacttagactcccacacattaataatgggagactttaacaccccgctgtcaacattagacagatcaacgagacagaaagtcaacaaggatacccaggaattgaactcagctctgcaccaagcggacctaatagacatctacagaactctccaccccaaatcaacagaatatacatttttttcagcaccacaccacgcctattccaaaattgaccacatagttggaagtaaagctctcctcagcaaatgtaaaaggacagaaattataacaaactatctctcagaccacagtgcgatcaaactagagctcaggattaagaatctcactcaaaaccactcaactacatggaaactgaacaacctgctcctgaatgactactggatacataacgaaatgaaggcagaaataaagatgttctttgaaaccaacgagaacaaagacacaacataccagaatctctgggacacattcaaagaagtgtgtagagggaaatttatagcactaaatgcccacaagagaaagcaggaaagatccaaaattgacaccctaacatcacaattaaaagaactagaaaagcaagagcaaacacattcaaaagctagcagaaggcaagaaataactaaaatcagagcagaactgaaggaaatagagacacaaaaaacccttcaaaaaattaatgaatccaggagctggttttttgaagggatcaacaaaattgatagactgctagcaagactaataaagaaaaaaagagagaagaatcaaatagacacaataaaaaatgataaaggggatatcaccactgatcccacagaaatacaaactaccatcagagaatactacaaacacctctatgcaaataaactagaaaatctagaagaaatggataaattcctcgacacatacactctcccaagactaaaccaggaagaagttgaatctctgaatagaccaataataggagctgaaattgtggcaataatcgatagtttaccaaccaaaaagagtccaggaccacatggattcacagccgaattctatcagaggtacaaggaggaactggtaccattccttctgaaactattccaatctatagaaaaagagggaatcgtccctaactcattttatgaggccagcatcattctgataccaaagccggacagagacacaaccaaaaaagagaattttagaccaatatccttgatgaacattgatgcaaaaatcctcaataaaatactggcaaaacgaatccagcagcacatcaaaaagcttatccaccatgatcaagtgggcttcatccctgagatgcaaggctggttcaatatatgcaaatcaataaatgtaatccagcatataaacagagccaacgacaaaaaccacataattatctcaatagatgcagaaaaagcctttgacaaaattcaacaacccttcatgctaaaaactctcagtaaattaggtattgatgggacgtatttcaaaataataagagctatctatgasaaacccacagccaatatcatactgaatgggcaaaaactggaagcattccctttgaaaactggcacaagacagggatgccctctctcaccactcctattcaacatagtgttggaagttctggccagggcaattaggcaggagaaggaaataaagggtattcaattaggaaaagaagaagtcaaattgtccctgtttgcagacgacatgattgtatatctagaaaaccccattgtctcagcccaaaatctccttaagctgataggcaacttcagcaaagtctcaggatacaaaatcaatgtacaaaaatcacaagcattcttatacaccaataacagacaaacagagagccaaattatgagtgaactcccattcacaattgcttcaaagagaataaaatacctaggaatccaacttacaagggatgtgaaggacctcttcaaggagaactacaaaccactgctcaatgaaataaaagaggatacaaacaaatggaagaacattccatgctcatggataggaagaatcaatatcgtgaaaatggccatactgcccaaggtaatttacagattcaatgccatccccataaagctaccaatgactttcttcacagaattggaaaaaactactttaaagttcatatggaaccaaaaaaaaagcccgcatcgccaaggcaatcctaagccaaaagaacaaagctttagtgattttcttaatcctgagttctagtttgatcgcactgtgttctgagagacagtttgttataatttctattcttttacatttggtgaggagtgctttgcttccaactatgtggtcagttttggaataggcgtggtgtggtgctgaaaggaatgtatattctgttgatttggggtggaaagttctgcagatgtccattaggtccacctgttgcagagctgagttcagttcctggatatccttgttaactttctatctcgttgatctgtctaatgttgacagtggggtgttaaagtctcccattattattgtgtgggagtctaagtctctttgtaggtctctaaagacttgctttatgaatctgggtgctcctgtattgggtgcatatatatttaggatagttagctcttcttgttgaattgatccctttaccattatgtaatggccttctttgtcccttttgatatttgttggtttaaagtctgttttatcagagactaggattgcaacccctgcctttttttgttttccatttgcttggtagatcttcctccatccctttattttgagcctatgtgtgtctctgcatgtgagatgggtttcctgaatacagcaccctgatgggtcttgactctttatccaatttgccagtctgtgtcttttcattggagcatttagcccatttacatttaaagttaatgttattatgtgtgaatttgatcctgtcattatgatgttagctggtgattttgctcgttagttgatgcagtttcttcttagcctcgatggtcttcacaatttggcatgtttttgcagcggctggtactggttgttccttttcatgtttagtgcttccttcaggagctcttttagggcaggcctggtggtgacaaaatctctcagcatttgcttgtctgtaaaggattttatttctccttcacttatgaagcttagtttggctggatatgaaattctgggttgaaaattcttttctttaggaatgttgaatattggcccccactctcttctggcttgtagagtttctgccgagagatcagctgttagtctgatgggcttccctttgtgggtaacccgacctttctctctggctgcccttgacattttttccttcatttcaactttggtgaatctgacaattatgtgtcttggagttgctcttctcgaagagtatctttgtggcattctctgtatttcctgaatctgaatgttggcrtgccctgctagattggggaagttctcctggataatatcctgcagagtgttttccaacttggttccattcttcccgtcactttcaggtacaccaatcagacgtagatttggtcttttcacagtcccttatttcttggaggctttgttcgtttctttttattcttttttctctaaacttctcttcttgcttcatttcattcatttgatcttccatcactgataaccctttcttccagttgatcgaatcggctactgaggcttgtgcattcgtcacgtagttctcttgycatggttttcagctccatcaggtcctttaaggacttctcggcattggttattctatttagccattcgtttaatttttttttaagaaagatctttaagtttactacaaaggccaaaggtagatgtataggtttcatggaaggaatgaataaggcagtgaaatgctgcagagactcacaagaataagaaccagtcatttgagttggcaatattagaaaatttagaaaaggcaattttagtggaagtagtagtgaaagtaagattttgaagatgttaggatacaatctcatgttttcaaaccacaagctgaaatggagacaatgtgttaaaatatttaaaattggaattatcccagaaaacgtagtcattatagttatgctactatagttaaagtaggagtggtaaagctaactccttataataggaggggaagtagattcatggaaagattttaattttttggataaactgaaaaaaggtgtaaagagagatgcatataaggtgctagaaatgagggaaagaggttaaagaacatgtaggataaactttagaaaaggagattaatttttctccttctgggggataggaaattttttagatgaataattgtgttagatttttttagattaataattgtcaatctatgagattagttttcagtattccgttttttggattagctagtttcttagcttgtgtattagtgtcaagtatgcttgcctagagtaggagttcaatacatggctgttctcattagtggtgctgttattttctctatttgaacatgttactgcttcttaccaccaccagtgagtagacaaaagagagtccattaaggtcaaaccagataactaactctatttggtttatcagtactgcatttcataatcataagttggctggccatgattccttctgctgtttatatttcatcttcattatcttgcattgtacttgaaacaacctatacttttgttcattcatgtcttgatttgtttttcagtggtcattctagttgcaattttttttattctaaggaaacttgctttatgccgctggagatttgcacattttacttctatgtactcacttaagtacatagtgttaatggcagtcgcatgactcatagtctgcataagcataaattaactccagtacctctgtagtatgcccctttgagattgctctggaagaccacccagaagtctgaatttacacagactgcaaagacccattgaacttaagaaaacccagcagcactgactgaccaaatatacctgcatctttcagtatgaacgagctatccatttgctcttgattgaggttcaaactgtggatcttaaactataaagggctttatgggctgaattatggatactttaagcaagacctcttccttcaaatagagtgctttgcacatagtgagcactccataaatgctcttgactgactatgacttaatgaatgtttagaccttccagtgaacttcttttcatgctttccagatttgaaggaagggttcttgatattgaatatttgtctttcttattagttttgcttgggggcttactatagtgtaattttactgaccacagaaaatttatctttttagtgatgaattattttaggtggtctgttggccctgcctgagtaatcaatggaatctaaggttttataatttgattcatgtgttcagagayaatagctgaaaaataaaataatagttttaataagttcaccaagaaagtagcaaatgtattattttttgcctcggggctgggtctttttctgatggatttttcacttgtttggttcttagttcattgcttctcacaaagacaactttataacagtgctgcttaaaaacttttcaatgtgaaagtttatacaatgtgaggggacttttttaaaaaaaatttattcccataggttattgaggaactggtggtatttggttacatgagtaagttctttagtggtgatttgtgggattttggtgaggggacatattttacttcctcattaggcaaaaagttactttggaaattactaatataaacaaattggagtaattagaaagatagaatgttctattttaaataggtgagattttcttagctttaaaagaacattcaggttagtggttctcaggattagctagagaacttaaaagtatagatttccaaattcttcaattgtgcttttcaaaaggttaatgtaattcagataataatacatgttcttgaattattgatttgggcccagggaacaagtggtttagtacagattttctgtccccaagttaagtcaagaaacattttatactatctcttttcaaggcagttatatactattctattataaagtaggcttttagtatccttatgatttttttaaaaacaagaaaattatatgaatctaatatcctgtgtcggaccatgcagcttgaagttttcttattgatcctagtagctcacgagaataaaccaggaataaggaacaaattgaagtggcaaatgactccaaaggaacaaaacttactcttccttcatttcttccccatatactaaatgaaggtactactcattatccacccagttaccggagcaaaaagcctagcagtcatctttaattattctttccctcacctcccatatctagtctaccaatgcattttgctccacctccacgcaccttcaaaatatatcctgagtctgactcctcttcatatccattgctcctgctctagtctaagccaccatcatctttatccgctttgacctgaactattataagcctgtcttctttggctttttaaaaaatcgacttcattttttagaacagttttctatttacagaaaaattgagatagttcagagagttcacatataccctctcacccagtttctcctattaacatcttacattagtgtggaatatttgttataattrtaaatgaatattggtacgtaattattaactaaagcccatttttttcatactttcttagtttttacctaatgtcctttttctgttccaggattctatccaggataccacacatttagtccttctgtctccttagtcttctcttggctgtgacagtttctcagacttttcttatttttgatgaccttggcaggtttgaggagtcatgatcaggcattttgcaggatgctcctctgccggaatttgtctggtatttttctcataactagattggggttatggtttttttggaggaagatcacagaggttaagtaccattttcatcacatcatattaaaggtatatgcgaacaacacgtcatcacttttgatattgaccttgaccacatggctgaggtagtgtttgttaggtttcttcactgtaaacatacttttttcccctccttttcctagtgtattcttaggaagaaagtcactacacacagcctacacttaaaaaagagtagggatttatgttccccatccttgaaggcagagtatctctacataaattatttggaattcctctacaagcgagagaagtctctttttctcttttatttttatttattatcattatttttcattttttagaggcagggtattactctgtcactcagactagagtacaatggcatgatcatagctcactgcagcctcaaactcatgggctatagtgatccttccacctcaaccccccgagtacctggaactacaagtgtgcagcaccatgcccagctaattttttatttttttttatagagaagggggtctcgctatgttgcccaggctggtcttgaactcctgggctcaagtcttttctttatttaatcaatcacttatttatatcagtatagactcatggatattaattttatactttgaattataatcaatactactttatttatttttgttgctcatattgttccaggtttggccattgagagctttttcagttggctcctttgtccctttgatgtattcccatcaatgtggggtgtattttttttgttgtgtttttgagtgcctcttactttttggcacttcttgatgatccaggtttatcttgtatatttcctgccctagtcctagaatcagccatttcttcaaggagtcctggttttctttattagagagtagtgttggaaaccaaaatctgaatggtaggtggcctctctgctttgactttttcccctgtagttcattctccacataacagggtgaagatttaagtacatttaaattatattgcaacctgtgatgggttatccttatatctttcaaaatcacaactccttacaatggtgtttaaagttgtggtctacccttacctgcttctatgattttatctcttagcattctctgtctcattcattccttcctggatgcattggcctcccgtcaccctgccttttttctttcttcttccccctcccctcttcctaattttaacccccaaattattaactaatgatttttaatgtagtattgtctaaatagtattaccttccttactaaaaggaataatgtaatgatcaattttataacttatagttaccattatatataataagttatataacaatggtgcgtttaggccctaatgagctacataggactctctttgccttctaaataattctagagagttctgtaaagtgaaaagcatgctcctcctttatcttctcatccacatttatgtcctcagaggctattgaagtgtccaaagtgctagtcaactctgtattgctcttgtctgagatttttacagctttaaacttttagagtctgtcagtaattgtgtctagaactagcccgctagccataacttctattattctattcctgattacaacctaaggcagaaatgaaaatttccagggaatataagaaaataaatattatgtataaaactggtagagtaaattttactaacccctaatctgcttcatcccccagagaacacatggcaagtgtgtacacaacaccaatcttgaaagacaagaccaagaaacaaatgcataagcaaataaatgcattggaaattgtcacaaagtgatatgaagagacaaagatcccattgattagaatcttctggtatgctactggtggtctccagtaatttgcagaagcagctgcccaatggccaaaattcaggttaagcactttggcagaatatgtttgaaaatagtgatgaggagtagggaagtaaaacacattttgtaaaatgagttaaagtgtggaagaactgtatacgttttgtttgatttggctaacttctaggtttttggcttttattggaggtttggggttgctaagtggctgactgtagaagaagtgaaatgtatgagtttgccaggactgccataacaaagtatcacacactgggagacttgacagaattttattgtctcacagttttggagggttgaagtccaagatcaagatgtcaccaggtctgatgtcttctgaggtctctcgttggcttgtagatggttatcttctccctgtgtcttcccctggccttgtctctgtgtgtgtctgtcttaatttcctctttttataaggtcactagtcacattggattagggtccccctggatgacattttaacttgattaactctttaaaaatgttttttccaaatacagtcacattctgagatattaggggttaaaatatcaacatacgaattttgggggaacataattcatccaataacatgaaggtatactctgttctctttagtgttattttcttagcattgtgaatttattctcagtagataaaaggccttgactttaaaaagcctcattctctgtggagatataaatatacacaagaaacaattacattattttagaggaaacataaatcacatagacaggaattcagagaaggtgaatatcaacaaggcmtagggaagaattgtagaagctgggagccaaaaatggccttacaaattatttattttttcagcattctctatctgtaggtttgagttctacagatgcaccttttcgtcccctcacacttactttttcctctgttcccttctctctgttttcctctttctttattcctgggaatgcagggaaaaaaagtaggtaatttacctttttaatgggatagcttgtgtggggcaacattgcctcacttcagtaacttaatttcactaatgagaagaatggggttcacaagttaaatgatttgtccaggtttctgacctagaatccaggtcttctgattcttactgcactatgcactcaagtgcattgtgccactattttagtgggagaatgttttatttgtgttttaagaacaaataagattgcttttccatattgcataattaggtcatttgtgttattttccattagccttccctcttaaacatttccaatttcttcagctatttttattactattctcttatttttttcctacataattttggcatccatattaaagtttcgcctcacataagatcttaaccaaagtaataattctttcttttataatatagtgctatttttttttaaacttagctttactagtacttgtaccacaagtatgatattactaattgtacttgtggccataggtaaacttcacttagcatcattgtttcgatgaaagctaccttttactcaacttctaatatgtgtcaggaccacctaggtactttatggtatcgtctcatttaatccacacaaacgtttttaaaggtgaatatgttacctgttttatagatggtaagactcaaaatggtcattgacttctctaaagttgcatagggtggaaagtgggagagctgggacttagcttgttctgtttgtctctgttggctcctttcccacaactgttacgtgaatatggacaagaaatagacctatttgcttacgatgtgtacctctgatgcctacacagagcctgcttcctcagaggtcaatttgtggaaaaatgaatgtggcccacagcttctaaatatatttttatataccttttgctcttttagtttctttgagtcatttttatgtctcaatttgttctcccagatattaatgttttgtaatgaatttagacttcttcttggaacatgatttattccttcttgatattggcaaatcttaagactttggcgtgatttaatttagtgatatatcttaaccaaacaaccataaatctcattttcacattaaagttaaaagacgtatartactatattttgttaaaccacatgatttgtcataatagttgtaattgtatcatgttttcaaagtggcttgactgaattcttgctgttcttttgctcatgattatcctgatttctaaatttctgggttttaaaattctatttttttcagttttttaaaaaattaaccgtaaaattaatgggcaccttttatttaaatcattattatcgaaatgtaacatagaggcctaagttttaaacacagtgaatagctaactcataacctactgctgcttagttaatatgttgggttaaaaggatagaaatacccaagtaaaagtggactggcaatgccagaccctactatctaattcagtgaggactctagagaaaggcaggtttggaatagaaatgatatcagagttgtgggctgggatttctgtgattctcttggtgtccctctcagggctgcaagattgctatagcagttctaagtggcatatccttatgtggtattttcaaaggcaggaaagagggaaagatagaaaaagggccttctccctaaatcatctctctcattttcatgcagaaaaatcctttctgagaagcatcaccagcagactttacctttcctctcactgctcaggactggattaagtgcttctccttgtaccagtcactgacaacaaatagggttgccatgattggcttagtccaatcgtgattcatccctggggagtgcacattttttagcactcttcaaaatgggaattctgtttttaagacaggctattaggtaggcaattaatagtgtctgccactattactgaactcctttagtatgatcaaatagctattatgcacaaatgtacaattacaactctgatgagtgcaaaggaatgactggtgctatgaaatgaaagggatttaatcgagcctgcccactcttcttcaaataattgataattaggctaagatgtggagaaagtttcagaagttaggtaggcaaaggrgttaaggtatagtagagtgggggagggaggaggaagcattccacgcagaggaagcatattgtgttcatgtaaattgaaagggcacataaatattcactgctgttctcactagtcactggtcggtgaaggcctttgagttacttctaggggtagaagaaattggtagaccttgtaggtctacaagtaggatgctgaaatactggaatttctgaaaaatttccatgtgttgaagggacaacagagcagattatttgacttggattgttttacaaaattcttgctgtagagttgccatatataatgcgcttacagacaaaaatcaggctgtcacccctgctccttctaacagttgcctgcagctagaatctttagttgatatcagttaaaaacattaagaacagcaccctcacttctctgacaccttctgcaatgctaatttctgtacttgatacttacatgattcccattttaaaatttttgatacagttgaacattaaatgaaaaacaatgttctctgagattttgtgggtttccccagagagacaataaaataaaatatcttttggcttcaatacacatagaatttttgtggacactgggctattctctgcaaggataaaatggtagttttataaatttgtccaggagtatacagctgtaaccaatgactaaaagtgacctcttttgaaaatttgcaactctattatcaaaagaatgcatatattacataatttaattatttaaaaagcattcatgatactcgaattctcctagtgtctaccctttctggcttacaattcatgaaaatttcattttcatgtttaaaaatttggaagtttttatttaaatcttgtaaaatgtggcaatattgctatggtggataggatacaggctcaactgttctgacaagactccaaaataatagtggcttaaaaaaaaataacagcttggggccgggcgtggtggctcacacctgtaatcctagcactttgggaggatgagacaggcggatcacttgaggtcaggagttcaagaccagcctggccaacatggtgaaaccccgtctctactaaaaatagaaaaattagctgggtgtgatggcacatgtctgtaatcccagctacttgggaggctgaggcaggagaattgcttgaacccgggaggtggaggttgcattgagctcataacatgttcctgggcaacagagtgagattctgtcttaaaaacacacaaacaaacaaacacaaaaaacaaaataacagttggagattcatatggcagttgcataggtgccttctatcttattgatttactattctaatatcagtttttccctcatgatctaggaatggctacttcagctcctggaattacattcacattccagccagtggcaagaaacagaaagaagggaagggtacattccttccctataagggaataactcagatgttatcacctcacttttgcttgtatccttttggcaagaacttagtcatatgggtacaactagcaacaaggcagttgggaaataatgtggaaatatgtctgtgtgcccacttaaaactcagagattttctaaaattaaaagggggaggatgaatattggaaggcagtaacattctgtgctataatcaccatcttttggcagttgccaaaagaaacggttgaatagttttgaacttagatgtgagtatataatttggggtaaaatgggtgtctgtggagacacaattatatttatgcatgttataccctattttatgcaattttgtatccctaccatctagcatagtatactactaaaaataaacacgtaaaaatatgtttggaatgaatgaccatccttcttttcttttcttgtgcaatccttattagatatgtatctttctttttacatttgccgtatattcatccttatccatatttcacttcccttctcaaaggggatttaagagtcgaggtgatcatagttcatagtatgttagaggagtactttgtatctctgtgtgtttaagtctgtatgtaaaatctaataggaatctgaattaacttaaaacaacaaaggaccagttttccctatccccaaattgacagttttaacttctattatcatgttttaattatcaatagagtagctgtattcttttgagtgttcagtactgtatctgagaattctgcagatttttttaaattgatacccaaggccattaattggtttgtgaagatgttttctctgcaccttacgtgtatattttatgtattgatcagctatccctggagaagataagataatctgaggaataaaagtgttctgacatgatttttttttttgtatctcagaattaggtattctatagacattttgatcatttatcttgtttttggccttctgttaatatacagattcatttgttcgtgtgttaatttatactacacctttttaataattcttaagtctcaggtgctgcattcagtgttgggagcatgaggatgcatgagacccagtgtgcacctcactcagcttcgtgtcaatgccacaccatgtggggagtgttgtgccaggcccccactgtggggtaactgagggggaagaaaggagcttgtgaggcaatgggggcaggcgggatgctgacatgattcacgtgagccttgattgttgagaaataatatggcaatagttccatttgatgggagtgatacatrcaaagtgtgagttagagatggattggagagctggatcatggaggaccctttatacgccatgcagaggagtgggcacttaatgtcgccaggtcagtggctttcaaacctttttgtccacaacccatagtaatgcatatgtttttacatggtgacttattactaggcctggacctaacatttgcagggcctgggcaagaggacaaatggtagcatagatacatactgtatagctaaatagttaaaactcaaggcaaaaaactgttagaaaaggatataccaacctrtcttgacacatacaccttataatgaaaaatgataccaaatgactgagagtaatgcaaatttaaaattaattttgtcttccaccaaaagactatgaatttaccctgaggaaatgccaggacagtggtaactgggccaagctgggggagaggagggaaaggctcactcagccttctcttccaatggccatggaatctgtagataaatacctcctttctcttgctcttttttgggggaggggtgctttcatttctgccagaggctctgggcccccacccattgctccttctatacccaacagccaggcatcgagttccaaagtgatctagtccatgacaatccagtccaagggcaacctctggccmccaggtgctctcagccactcaccctcacaggagggtttgcattaagagttctctgagcaggaatgtgaagaagtattgagacagggggcccctgctttctatgccacacctttttcccatcttttagggccaaggggtccctccagccctcaggtccaggctctttcattcagctgacaacttttggccactccttggactggaggtacacacatgctagtagtactacctgacctgaagaaggggcccatgtaggtcagagtagcaacttaaggccatttgggtagagaatgatggtgatgctggtagtcagagattcaggtggaaaagagaacttcctggctggtggaaaacagcacaggcagaggaaggccagagcaaaagcttcttgctcatcattggtggatctaaagggaaggagaacattggttatgaggttattcagccaaggaaaggcctaaagatggtgaaagtgaagatagagaggaggggagggatgtagaatccgcagatcttgatgactaattagatattgggggtgcagaagaaatctagaataatgccatcatttttgatgagtgccatttaaggccacagtgtgacattcaggtagtattttgtttattatttggaaatatgggtcaagatatggtcaaagaagtgttttcatttggatagtttgttaagatgggaatttctaggccccacttactgaatcagaatcaccaggagaagtcctgggagtctgcaggtgagcaaactcctgcggtgattttgagacacatgggtaccctagagagtgggaacagtgtttcaggtggcctgagggctgaactctggtgctcaccaatacttaagggacaggaggaggaggggaagtgacagacagacactggaaagaagtgggcagtatgtccaatgaaagagagaggtttagtaaagtatggacagtgacacggcttgtgcatttaacattgggaagcttctgataaaccttagcaaaggcagattgcactgattcaaggaccgaatatgttgggagattaggaaagggagatagatgatataggatatagtctatacatcttttttacattataatttgattgtaaagccagatgaaagagggataacaaagcaaggcacagatttgaaggaggcctttaaaaacaattctggagcacttatatgatgaagggaagaggaacctgtggagaaccagatactgaatatatggcagagaaaaggagtaattgatatagccttgtttcaaaggagatgagagatgcattttaggacccaggaggagggaagcttaagcagaaggaagaacacctctggcttctatacagttaagaaggagaaagggcatgcatagatgcaaaaaattctcttaacagacatttgaacacaaactctagtcacaatttaggtgttgtggctacagaggttaataaggcatggctatagttgagtgggggagatagataaggaaaccagcaagataacatgtggcaagtgttgttagagttgtgctaagagatggtggaaacacaggggagggcatgagacaaggctttgcagaattggagagagggcaaaatgtgaaaatgggtttgtacctgaaatagaaggcagggacatggaagacaaaggttgagatgaggactatggtagggccaggacttagggaaaatgtgcaccaggattacggcagtggtgattggtaaccatggatgcaattttacgtgtacatgtatatgtgtgtattacatattacacatatatgtgtatatattttacatatayatatacacacacacacacatacacacaatcatacaattataagcatcagctgaaactttgtttgggaggacttcagaaaatgaatgtttatgaccaaggaagcttcttgcttatccttccctttcctcctttgatgacttttcttgaggctaatttaggtacagaaagccaccgcttccaaaagtgctttggwaccctggcataatttcaaagaaatctcctttcccacttagttaactacatttctccaggaaaaaaaagtcttgtctgtcaatgtaacatccttttaacaggactcccgctggttggttcttgtatcttgctgtggcagctgtgaacatatatactattgattgttgatgtgtgatataaatccgactggagcatgcccactaattggtttgagagctagatatagacaatgctgttttatagtagcttgtgtagataggcctagtcatagggttaattctgcttgacagcacatcagcagcatcttgagagtaattacctaacagaagttttcccacagccgaactgagagcttcaaaggcttctgaatttacaaccagtattaaccaatatctgaaacataatgttcccacaagagctcagaattttttctccttcttattaaatgtatggggttactaggttcatttgctgtgtgctaagaacttagtgaaaagttacttcgtgttgaataatttcaaaccttgaataataaagagaataattatgaatttggttttgtattgctttattatcttactgaaacaagttaatctgtaaagatcaggtgccttttaaaaaaccgtattgtatcctgtttcacccaaaaacaaatttaaaaagttaatgtcttttccatattgtgctatctgtattgatatttgcatatttagagggcctagggtaatgcatgcatataaaatgattacaatacatatatattaacaktttagaaatatacactgaaaaatgtaactattacctcccctcccaaccacaccccccccccccatgaaataattgttcttttacaaacagtttttatattgtaaaaactttctttctctttgcaggtcagaaaccaaatttgactccggttcaggtatgtttacattaataatgctcttctgaatatattttatttacattattctctgaggagtaaatcatyagatcaagaaccattttgattttaaacagactaggcggtttctttccaaaatgtgagtcccacctcaaagcagggctattgactgcatcaaatcataatttgaggtgttcactttggagtcttcatagctctgcaataagcattacatgacctatatctgcagagtttcattttaaaagcagaagtgggggttatacatactaattgctcaaagtagattattattttctcagtggacaaagcatcctgagtgatttgaaaattctctttaggttgtcaccaaatgtgggagatggatgcatttaattcagcaaactatagagagttcaagccaatagaaatagaaatttgtctatggtttattagcttgttttctcttaaaaaagttttattgctagatgggtgatagaaaatgaaggtcaccttaagccattattttgaatctattaagacaaaatttacattctcacaagcagtggcatatcagcctctttagacattttcttttcattaagcatgaaatgtagctatataattctcaggtttgactatgtcattatgtcacttgctgagatttatgtgcttcaaagtttctgatggcatttacaattaaagcacaaaaattgcctcatatttcatacaaaggaattacgtatgccctttggtagactgttaacagataaataaacattaatttttgaattccaggagaaaataatttacagaaaaatatataacttgttgaatttacaagtaacatttttactctggttcaagtttcactatatggtaactttaaaaatgtttttacttattatattcacaaaggaacaagtgctatatattccttttgatagtagtgttaaggagacaacacactttttcttctttataagccttttctttcttttattgtatggttttgtgaatttggtgagactcattaactatgaagtctatacatttgagttaacaaatttacctagtttggtaactccagaaatctttggatcctgtgtcttctgcagcctctgaatcagatgtatgaatggtagtataagataaacatttttggttgaaaacgctgactatatagagactaaaggtgggatggcattgtgtcaactgtttgactccttgattcacaaatggctcaaaataagacgaaaaatctttttcattttttaagttaaaatctttaagtataatttaaaaataaatgaataaagttgatggagagtgtaattttacctaaaaattacatgtctcttttttccctgccagtcaccaaatattwattaagaacccacttcattatgatctgatgtaattccctaaacatcaagtcagaaactggttttagggtacagggtctggaatatagcttttaaaaatgaatacgtccactaggttcatcttgaaggtagaattgaaggtagaacctggaagtagtttacaaaactgaaatattaggcagctattgtcaaagtcagacaatttatgttaacttttcaaatccaaattaaagtgtgctgctaaattcctgtactgaaggtaagtatttatcatgaaaatagttataacagctgtacaggcacacatctttcactcttgtgaccaaagattttatgcatgacttattttttttcaagttcttatttaaaaaaaatctatcatggacaacatctgcatgtctttgaaaactacaaagttctgtactctgaaaagtcttaaaggggaatactgattaaaagtttatttgttcttttaatattaaacttaaatatgttgtggaaagaattcagatgttttcaaattaagaaacggaattattttttcttataagctccttttagcttatgactgaaagaatcatgacaaaggaagctagaaatgtattctttggcatcctatatcatgaaaattttggttagaaataaggtagcatagggccgggcacagtggcccatgcctgtaatcccagcactttgggaggcagaggcaggcagatcgcaaggtcaggagatcgagaccatcctggctaacatggtgaaaccccatctctactaaaaatacaaaataattagctgggcgtggtggcacatgcctgtagtcccaactactcaggaggctgaggcaggagaatcacttgaatccaggaggcagaggttgcagtgagccgaaattctgccactgcactccagcctgggcgacaagagcgagactccatctcaaaaaaaaaaaaaaaaaaaaggaaataaggtagcatattggaacaattaaataggttcagattctctattgtgcatcaaatacagaaagtaaactaggtctgtctaatgttgtatacagctctgacaaagcaagatttttaaatgaaggaatatgccaatcttactaggaaaaacaaaaccataaaaaataaatactatggtcagtgaccagccataacggaaaggatttcaaagttaaattttatgtgtgtgtgtgtgtgtgtgtgtgtactcacacacccacacccccaccacacacacacaaagtatatcaaggaaagtacccaactttatgcagagcttaccgcacaacatttttagtttaggtaaatgagttttagcctgtggagtgagattcatgagaaaggaaggaaagttttcattgccagcacatggtaaaaagtttcatttgttgaatgtataccaaatgattatcctagaaattgatttaaattttttctgatcagaattgcatctttctttttttttacaaaagcaaatcctcaacctcctgtgctttttaaattaacaattttttataatcaaaaaatttcaaccatgtataaaagtagaaagtatagtgtgattagcacccatatagtcatcctctaaatgttacttttgttaattatttgccgaatttgttttacctttttttgcttgaaatattttaaagcaaaatacatacatttcatgtgatttttacaatccagaaattatagatggtcttgacttattaaaaggcgttaaagttttgaggttttcatctattttagaaatttgagtgacatacacgtcattgtgtaaaggatcgtggcattttcatgtccacatccagttgaaaactctttgaaagtcctatttgtggtgaattgtataattaagaaaaccttcaaccagaaggcagaggccctgaattaattctgacctgagaactccagaaattttctattctcaaaattagttaaaatgtcagctgccatttagctgtggtctctgtgtactgagtaatatactgactaaaaaccttttctgttgatttataactcaatcacctaaagtttttggctttgccaattgagaacagtcagcttaccttctttttaaaaggagttttaaggtttccattttatrccttttcctagttgatgtactaatgttggcttgcctaggattgtgtggagttggtgattttactaatagagtaaaacagacttccttttatgttcagaagtagcaagaagctatactcttctccccacctcccaagaagggaagttagttgatgctggaggaagcagagcattgagtttaatgtagtgattaaacatgaaagccatatatcaaatctcaggagaaacatgcttttgaaagaggcagagaactgtggagcatattgcatgataggctatataaacagagccctggaggtcagtgtgtggatgcaaaccaattaaataaaagaacttactggctttgctttctatcatctggatggggaggatcacaagttaacatgcacaggattgaagtataaactttgcttaaataagctaggcacctttggaaatttcattaactctttcaatccactgctaactatactttcaaaaaccaaagtctctgggaagtttttaaaaaatccaaaatatttgttctcttggccctctgtacatatccattggcaaagagtaatggactagtaatgagtaggatggaagaaaaagtgaaggatgagggtgaaaagaccaggagttggctctgtcgccaaatttcaagaacatgcacgtctctcaaacacaagccatttggaaaagcagagctcttgcaaaataactgaaaaaagatgtttttctcttctgaattctgggtataaggatataggtggaatttactagtcactaatataacatcaggatattgttatttctgttccaataaagtagaatagctttctgaccaagaagaatcttatttataagttaaccttaacttattaacttatttataagttaataactggatgtgaaggacagcttgtaccgtaattctgtggtcccaaccttatcaggcaatgtttgggtgagaaaatgaagtaccaagttaaatggtatagattcatggtccataaacattcaaaacaaagattttttttttctatagagtcatgttggctgagaaagtgaataagcttatgtttagtgcttgttgattctgggctgcttggaatagctatactaaggaaatgggctcatagaacacagcaactcaaaggtataagatttcatgaaagcgaattatggaggattaagaaacctaatgagcatggtttagtgtgcggagttgaggagggagctcactattaaataaagccgagagcgtagaaggttaggagatcctaaaagacatgattataaaaggcacaacagaatataattatgctgaaggagggagggcggaatccaaggaacaaaaagcagctagtgtcgcttttaggatctgtagttaaaaaggaatctacaccagggtaaggaaatcaaagaacacaatcagttaaagcttgaggcaaaaacataagggcagggaaaaatagagtggggctgttaaggtagtcactaagttgaagggaaatgaggaatttgaatgtagtagaaatagagttttgaaagcttattaacaaatgagagaatttgcctaacatagtaaactttcctcaagaactattaataaggaaaatattttcagttcttgttagcatgagaatatgttgacaatagtttttagccatacagtttaatttcttcattttaaatttcttattttaaactcataacattgaagaacaaggaaataaaatataaatatttatataagaatattgaaatctgcatttgggcatcatttatcagcagaaataagaaaaatattgactattcatctattcattcattcatcatatatttactgggcataccatatgccagatgttgaggttatagctgtgaacagggtggatacaattccttctgtcatggaatcttatgctggttggttggtccatggtccattatacaaattcacatgaacttacctgcatacttaactgaggaggcctaacaagactaaaacttaaatctaaatggtgagtcaaagacctcttgatatttaaacataagccaatttattttagatttagacaaattcacctttctttactgtattcaagcgatatcatgctgttttccacagacttttaagagaacagcctaataatgctaatggttagggtgtaatttttctagcgttttcaataaggagtgacattttccatttgattatcatctttaaaaaatcaacttagatgagaacacactgacaaatatttgtgaataccgttctattctttgtttttgtttatttcttttacaggatcctattcaagattagcctgaaaaatcaggcaaccttctctatagcaatctttctttctttcttttttgagacggagtcttgctctgtcgcccaggctggagtgcagtggtgcgatctcggctcaatgcaagctccgcctcccaggtttacgccattctcctgcttcagcctctcgagtagccgggactacaggcacccgccaccacgcctggcttttttttttttttttgtatttttagtagagacggggtttcaccgtgttagtcagatctcctgacctcgtgatcagctcgcctcggcctcccgaagtgctgggattacaggcgtgagccaccgcgcccggcctatatcaatctttcttgattgaatagaatcaagtagaggggacacggctcttcatcccgttttctaaactaacttgaccaggaaacagcaaggcatagtggctaagtgctgaggtttgggtcagatagatgtaagtctctctttcgaataattttctattgattttctcagatttcatatgtacccttatgtcacatacttacattttgtattttttcttagaactggagcatttaaaagctatgaatttccttcattggagctttagttgagtcctagagttttaatattttatttatttttattatttttttagaggcagggtctctattgcccaggctggagtgctgtggcacgatcatagctcaccataaccttgaactcctgggctcaagtgacctcctgcctcagtctcccaaatagcagggaatacaggtgcacaccaccatgccgggccaatttaaaaaacatttttgtagagactggatcttgccatgttgcccaggctagtctcaaactcctggcttcaagcaatcctcctgcctcagtcttccacagcactagaattaggcatgagccactgtgcccagcccaatattgtattttaaataaatgcagttttgattttcttttggacatgatagttacttaggaagctttttttttttaaatttccaaattttctaccttctacttttattcatgtttttcagttttattgtttggtagtcaaagaatttggccttactactttttagaaagtctattattcagtacttattaaagtttttttttttggcctcccatgtatttaatttttgtggcttttttgttggaaaactacattctctgcaatgtaaaggcttcagtggacatttattagacaacctgattcatgataattaatcctttgtatcattatttatttggtttttattttatctgacaaggacagtgaaaggaatgagtttgtaattttttttttttttttttttgagacggagtctcgctctttcgcccaggccagagtgcagtggcgccgtctcggctcactgcaagctccgcctcctgggttcacgccattctcctgcctcagcctcccgagtagctgggactacaggcgcccaccactgcgcccggctaattttttgtatttttagtagagacggggtttcaccgtgttagccaggatggcctctatctcctgacctcgtgatccgcccgcctcggcctcccaaagtgctgggattgtcattttttattttacctgaattctgcttctttagatattaccatccctgtgttgtcagctccacatactccataagtctggtggcagccaatttacttgggacatgcgttacacttgtctccttgtagagaacattactgcaaagcaatgctcatagaaatgaaggctgctaaactaacacaggaacagaaaaccaaacactgcatgttctcactcataagtgggaggtgaacaatgagaacacatggacacagggaggggaacatcacacacaggggcccgtcagggggtggggggataggggagggatagcattaggagaaatacctaatgtagatgacgggttgataggtgcagcaaatcaccatagcacgtgtatacctatgtaacaaacctgcatgttctgcacatttatccaagaacttaaaatatatataaaagaaagaaagaaatgaaggctgctgcaaagaggaaacatattattccaaactcatatgtgaagcaagaagttgctgcaattaccacctgtaaataaaagtgctctcctcctccctcatatctcatagctttataaggaaagaggctctgagactttatatgattcaaatrtttgttttctccacttaagatcgtcccccgactactccatcttgttggcaaggttctatttaccttttaatgctcacctcaaacattactatatcaattaaatgtagccttccttgacaccttcccagcagtcagccatctgtttctttgtgcaaatgctgactcttgtagcacttatcatctgcagtagttatttgtgtggatcttttctctctctccaagtctgtgaatttcttaaaggcaagaaccatgtctcattttcctttatagccttgatatcattttttatttttttgagacagagtcttgctctgttgcccaggctggagtacagtggcacaatcttggctccctgcctcctgggatcaagcgattctcctgcctcagcctccccaatagctgggattacaggcgccctgccccctcctccgtcccccgcccttctgcaaccatgcctggctaatttttgtattttcagtagagatggggtttcaccactttggccaggctggtctcaaactccttatctcaaggtatccatctgcctcggcctcccaaattgctgggattacaggcataagccacagcgcctggtctatagtcttgatgtcttatatgagataattactcaataaataaaagttccatgaagttggaaatttttgttctttaatagtaatagaaatacataactaatgatggaagatttattctccccttttatagtgttgggttgctgctgggaagtggctacagggccagagttgacaatttccaggccctttgcatctatgtggagacatgtaactaatttttgcagtagaatgtatgtcatttttaggttaaggggattaagtagccaatatgctttccttatatcacttttcctcttctgaggttaactcatagttacatgttgaacatgatgccatcacagtgtggaaggagtttggatccatacatcatacttggaggagatccacgcaggagagccattcatcctagaatatcttcattggacttcatatattatgaaataatttttttatgataagccactaagatttttctatcacttattatagcagctagtgttacttacgttgactagcccagtgcttagactagtccttggcaaaaagttatttgcctgtaattattatctagtggcaaatatccctggatagtttttggataaatgattgaatgagtggccaggaattacattatctaacctgaagatgatcctttaaaccaaggatcatacaaaaatagaatactatgttctatatagtcatcaagcctatcagctacatattatcacaataatgcagtataataggtcacctcaaaaagtggtgatttgaaacaataatcatttattcatgcttacatgtctatgggttggttgggtgttggctggcacatgctagttgcaggttgggtccaggtctgttccacacttgtcaatgatggtagaagataagagggcaagcccaactatgcaagcacataatgatatgattataaaacaccttgaaaatataaaatgtagtacatacaggtttgtatatggttgcgatgtggccattagtaggccattaaaaaggttgctggccacacacaaaaagtagcgttaatggccttggtgaattttttgtgtctagtatctggctattaactttcaggctcagaaacctagatgtttcactatctctcagggatgggctcacatggacaaacccagaagactgatggatgaagccagaatgctatgtatttctttataatgagaaatgtaattttcacatgagtgagaatacttacatctgcatgatcagtgtcttctttttttgtaagtaatccagctatatgagacacaaaatcgcaagaaaaattcacttgatcagtttaccaacataaatcattaatgactgaaatttccttactgtaacatatatcagcctaaagctagatatctttgagaagtcgaatcaaaatggaggattgctgttgagtacagactaagaacaaagaaaacaaattgaatgtttagttttatgagttcaagttaacaattatctatctccaaatagggatggtcctggctagtgagacctcttatgacttaaatttaattggccacaacttcattcaaccatccttccatccatccatccatccatccatccatccatccatccatccatccatctacccatccaccatctacccatccatctatataaaagatagccttgctgttggacctggacaatatactgcaaattcattgcctaagaccttgtttccaaattcacagagcagaccttggaagcgattgtagagctgacaatttacagtttaaatgtttcctaccttattgaaataaatattaaaattttagtggtttaacaaatcatgtcagtatacttaaattaacgtgtagaacaaggtcagtatatagatcaaaatatagaacatttccacctattatgttcccttataactttcttcagtcagtccccactcatcagaggtaaccactcttctgacttcagtcaccacagattaaagttccctgttcttgaatttcatataaaatagaattatatggtatatactcttttttatatggtggcttttgctccatatcatgtttttgagatttattcatgttatttgtacgttatcaatagttatagctgagtagtataaattgggaagtatattttgctccaagtttggctaccattgatgcagttgtgtttactgagcagtcttggtttctaatattctcaggtccagaagactgctattaatatattgaaccagtgtgtaggcatttttactttgactcagtgatcagtcatgatcagtcagtcaatttgcatgtgcatgtagagcacttactctatttaagacatggcgaaggacatatgagtatgagacagtttctacatttgtggagcttataatctaattaaagagatgagatatatacatatgaagatatctgtaggttcagggtaatttgaatggtttcagcaatggagtcctaaaagaatttagaagacatgaattactttagagtatggtgattgattggggcagttgcacggtggaggtagaactgaaataatcaagggtagaatatggatagatataaataaagaggaagataattttaaatagagggccccttaaggtcaggcacagagacgtaattgctaaatgtatttgaggaacagtaagtaaaccaacttgccagaactggagtatttttgttggggggtcctgatatagttgggagtctattagaaaccacaggcttggccaaggcagttggatcacttgaggtacaggagttcgaaacagcctggccaacatggtgaaaacccatctctactaaaaatgcaaaaattaaccaggtgtggtggtgcacccctgtaatcccagctacttgggaagctgaggtggagaattgcttgaacccgggaggtggaggctgcagtgagccaagatcgcaccactgtactccagcctaggtgacagagtgagaccttgtctcaaaaagaaaaagaattggtacttaactctgtggccaataataataacgacaatgacagcaaaacaattacaaaattgattttctgcctaatatgtaatatgctctgtactaagtgtttaatatttattaactcatctaatttgcatagaccatacattattattcccatcttataaatgaatagaccaaagcacaggaagtttagatatttgcccaaggtcacatagctagtaagtgacagaactgggatttgatcctaagtagtccgattcgagagtcttaaccaatatgcagtataaaaacctataatatgagttgatgggatgaaaacaatgttttatgcttttttagtcatacaccctattcccacatgacatacttgctcacacagtcacatgtagttgcagaaattttctccccctccaagtagttactcggattcagtagtctgttgagaaatagattttgaaggtactgtaagaattttaattaaaataacatgcatttattcccccagcattaaatttcctgctgagaaagatattcatgaaggatttgttgcaaagaaatgataaggaagagttaactggttctagagaatttataataatttgttttagactaaggctttatttttaacatagatcaaaattaacataatacaattaatacagtttactatggttttgacaggaggtgaaagtacttaccttgtactgatagatatttataaattggaatgaatcgatgatcatggtcaccttctttgggcagcagaacaaggattgtttggctattcattataattgagatatcttgctcattcctgggcagaaataagctacattcaactgcaatgtgtagaaaattttgctatagcacattacttggttgcaggcttaagatttttaacatcttgctccagtatgaaagtattttatttattaaggaacatgtacaaatgtagcaaaactatcagttatttgcttatagtatcaaaatattctagtaaaaatcctttaaaatgataatgactttttagttcttatgtcttgataaatttttcttcgagtcttttgtgttatagaactatcctaagaacattttataagaggttcttttgatttttcattaatttcccaggataggagtaaaaaattaacacatttaaagtaaatttttgcttaatgattgctagtcttagtgaattttgaatatctatgttttagatattcaagtattattccttaattaagaacttaaatagccatatggcctatattgtattcgatgttgcaaattagtaaacttctattatacttgtacttttgtttttgttaatattaaagacatacttaattgatatatatttaagatgtataattgacattatattttcacacaatagcatgtaataatgtttattgaataagtcataagtgaatgaatgacatatagaataatgttttgccatttccaaccaatgtgaaatatttgacgctaacaaatatcatccctttcttcacaaaatctgtctatatattaccatattaccttgcatctaaatgattcacattgtggatggaaggctatatgtagatggtgagagataaaagagacaagaaaatttaatgacaacaaaaatattttgtggcagaacataggaacacaaaacaacaatgtaaagattcaagttttatggcctatcagtggtttttctaccaaaaatagtaaccctcaggtcctccccagtcaatcaaaaatagactttggagttttattctaacttagatttaaatttatttctatgttagaatagtctattaaaattattttcccccgtgttgttatatagtaatagtaaaatacatttttacagtgtgaatgaaagtggcattaaaattcatttaaatttatacagtagaattatctttttaggaatttgtttaaatttcttgtattttgtggcttgtttgatatcactttttatctacatatttgctttttcaattatactacttaggaatttattcaattttttttcatcacgaccacctgtttagttagcagtatcccttgaaatattgtgatgatatgtggcttttactgatttattagatttgttggggctttttttgttgttttaagtaatgtactaatatatttattttttctagctatatggttttattttttcagggttgtagaagaatactacatatctagaacttagaattgcctataatttccagcatatatgttatacacacacccccaccacacacgtgtatatatatacatgcatatatgtgtgtatatatggatatatatgtgaataaaaatttcctcccaaacgttttaaaatcaggttaaatttatttatgatgaaatatgatttttttccaaaagttttctttgcaaaattagtatgcattttatgcaatttaagaattttataactagcaaatatagttatgtcaaatatggaagcaacttcatagaactatatgtacattatgattttttattaaaatgatataaatttttatgatcaaatgtacaaatcaaaaaggaaattttaacgtcaaaatgaatgtgatttcatgaatttgtaattttaatttacccgtgctcaatttcacaaatgtttgttgatcacacactctgattgagctttgtgcattgccttgaacaagctagctgtaaaatttgtaaaatagtttagtgcctagcagaaataactcttggtgtagaaatatactaatggtagggtagtctttcatgattgtgataaatatgaaagaagattgcctctttctgaagcctgtttattttgtagttaacaaggccaggggagacttttgattattttttgcttgcatgcctacacatacctaaggaaaaagtaatcacagatcccagtgtcactttaattatgccattaatttaagtgttgattcaacagctatttactgttcacagtattttagtatttgtaaatttcttggtggtatgggtaacaataaatggatgtttttatctaaagtaggaaatcacataaatgaacaaagagatgcattgttagtagaattttttttttttttttgagatggagtctcactctgtcgcctgggctagagtgcagtggcatgatctcggctcactccaacctccgcctccctggttcaagtgattttcctgcctcagctcccaagtagctgggattataggcatgtgcccccacacccgactaatttttgtatttttgtagagatggggtttcgccatgttggccaggctggtctcgaactcctgaactcaggtgatccacccgcctcggcctcccaaagtgttgggattacaggcgtgagccactgcccccggctgaattattttaaatgtagagatatgctgctcgataacaatcagctttattatttactatacatggctgtatattttgagggaaatgtttaaagacagattatattcttaaatgtgattaaatgtaatccctattttgtaaccagttttaaagaaataatattttatgcattttcaaagtactttaatttattttgtagaaattcaaaggacattatatcttttataaaaagattgataggaactgccttttctattttattcttcttactggtagatttaataattttcctcttttggcatgattttttcgaaagatatttcccaattcatatgaattttgatatctattatgtgtcaccatacaagtaatgagtctatgtaacaaaaagatgaaagcttctatatttatctgttatctacatttgttactaagagtcaacaggatggctttatataggatgatcagaaacaggaaagctgtggtttagaaaatgttttaatctgtttcaaataacttagcagggcaatctggtaaaaatgacatgattaatgactgaagaagattaaaatattttcacattctgtttttaatgacctctatcttaagtttctaccctaaaatttacaactagtaaaatattataggaaaaatatatcattcataatcctcttgaagtcgtgttttaccttatcaaattgtgccttctttttagccaaaaatagcataaatgtaaaacaaattttaactgaaatatagcttttgtgatattcttaaatacattcattaaagtgttaatatttactaggtttaacataaaagatctaagattatgttttcaattagggtaacacttcagtcagtgtgtaattttttaaaatttattcttacagctaggcagatcttcatcatttggaaacaggccattttagaaagtttaactctaaatgttttctaagtgcataaataggtggcatgtataagtattaatgttggagttttgcccattgattctagtggctctgtcttttttatccaaagataatgatgtgtattcaatctctgtcatatttacctagaggaagtctttttaatccctcatttttctccttcactgaggttatgtgtaaatactacataaaacagcaaatagaaggaagtctgttttgtctaaagataccattcatcttaaacaaatacatcagcctgtctccgaaaggatagcgatatgggttttatttggtgggagaaggaggaggatggataagaccaaagcaaaaatatgtggcaaattatatgaactggtattaaatccctttaaaaattggttacatttttctgattgtttctgcttaggggaatcacttcaatgccacccgacattgttacagcacctcttaattttcattattatttgcgtatttattcattcctattttcatagttaggaaaacttgtattgatttctgacagaaatctgaagctaatctttaattagatatcttatagcaccattttctggaaagccatatgtatgaatttataattccagtatgggaaaaagaatgtattaccttctcttaattatatctgcttttaattttcattatttctaaatttaaactcccacaaaattaaataaaatagctttctttaatttgctacgctgtgaattcttttgggacagaggcccgttaaatttatctgttacttttatccccagcactaaaaaaattaaaatgaattaatttttaattgcttacatttgcttacttatatttattgtgaaaactaatatatttggtgttacttctgccatcttgtttcctctttattatgcctccttgtggtctttttctttcctttagttggattaaagttttgcccttttaagaaaacttctagktatatgttaaatatactatttctgtttattctgtctaccatctaattctaacaaacatatttgaccttgtattttttctgtaaatattgggaattaattaatatctataacttccttcatttcagcatgagaactttagtacacttttgtctctgacccctgcatgtttcccattatgcctctacttacttaaaaatcattttttaagaattccattaagcattacagcatcattgttaactcctgtttaaacttaactatttaattttacctatttatttactcattactgtttcttgtatcctgtctttaccttttttagacttatttttcattgtgctgtagttcttctttggctattctttcagaaatggttctagatagcaaatatctgggttattttatatgcagattgtttatttacaactctcatgatatcagaaaggattagaggcagaagacacaccattacacatgtattctttaagagtagttattggtaaagagaacttacatgattctgggatctttatgttgcttccattaagggtggactcttttttcttttgaatgataaacttttttataggtatgctttaaatttagtttataactcattttctaaaatttttctcttggagaaaagaaggaatttgttaggtatcatatggttaaaaatacacttaaacaaatacttcataggcatcwtttccatgcaataaatatccagtattgagaaggaacatattaaatagatacctggtttagcgtgttaagatatgcatcttttcatgttgtagcttaaatttgagcttgctggttcttttttttctttaagagtagtatttttaaattaaatacatacaaattaaattttaaagaaayagtatcatctttgattaaatcagaatacacattgcatcaatttttaaatgttattaccatgtctggatacttagttaacaacatgttagagcaattcaaaggatcacaggattttactttgtttttgtagtttacaaagactaatgtagcaaagacctttcatgtcaattttgtcataagtgaaagggtagaattattggttacacagatacatgcacctttaatatagactatatatcctgatatttcttggtcttatctcattatttcaattctgagtttatttatgtaaggctattgtagagctaatgggtgacaggattacagtacaacagcagtatctcattttaaaaacactcagggagtaagtttgacacagcaaagaatatagtttgagaatgaaaggcaatgaacaaggggaaataaaaaaatcagcaacatgaataaataaatataaaatcaatgcaaataatggctaaagagtctacacatttttatgacttttaacttttactgtgaaatagccttccagaaaaattgtgccaatttctcctttcaccactgtgtgtagtattttttttcccccttggacacactgacagtcgctgagtgttactattatcttttttctttccagctctgaatatttctatctgtattttctttgcctatctgataggtaaaaagtagaatctcattattttaacttgcatttttgatgactagggaggttgaatatttttattcttatgtacattgactgtttataattcctttgtgaattgcttattaacttatttttctttggtgaggctggaaataagagcagggcttgagtcagacagacmatcatttgaatcctggctctgtcttttaagcactgtgtaacttggggcatataatataaactctctgagcttcaatttcctcatttgtaaaacaatatttataattataatgcctacctcaatgttatgagaattaaataaaataacatagagtgaaatcacttagcaaagtgcttggtatacattaatgatgctgctgctgataagacataaagctggaaatattttcccagttggttgcttgatttttttttcctacaaaaataaaaaataattgtaattagtgtatgtcagtcttttctttcttttatggtatttacttagggtttatactaagaaaattgttcttcacaacaaagagtataaaaatatgatgaaagtgtttttgaatgtgactgagttctaaatggaatcatcaaatttagttacacagactaagaaagaaactaataatttgtaatctttctatttctttaggaaaatattagcattcactgttgttgaagaaatccagaaacattagttcacatatttaacaagtttaaaaaaaaatgttttaagactgacaatacattcccctagattatttgtatatttaggaagggtctctgttattctctacagtgcttttgtgtccaccagaaaatgacgttgtgtttgggctaatgaatgagaaaaagggtcctctccttcccacccccacacccctgcccacactgcagctaaatgactcctgtgggtcaaggcaggtacacagccctggcagtgaggggaacaggatccggagttcagctcccacttgtttcttccaccaggttccttgtgcactgcccagagtgcaccactttatcagatgggactgtgtttcagtgttatctcaaaatggttcttgaaatagtttgagaaattaatgattattttatctaaatccacttgtgtaattcaactaaattgagcagctttttatccaggcacttttataaaagaaaagaagccaagcgcagtgcctcatgcctgtaatcctagcactttgggggcctgaggtggcggatggcttgagcccaggagttcaagaccagcctgggcaacatagtgagaacccgtctctccaagaacatacaaaaattagccagacatggtggtgggtgcctgtagtcccagttactcagaaggctgaggtgggaggatcacctgagcccagggaggtcaaggctgcagtgcrccatgatcgttcgctgcactctagcctgggtgacagagtgagaccctgtcaaaagaaaagaagagaagagaagagaaaagctttttaatttgaatattgtgagcaaaaagcaagagagcactggtacaaatatgcctccctcttttcttctaccttgtttattaatccatgagctcttaagggatggcttcttcctcctcgtaaataatgatgttaatgacatatctggggccatgccctttttcatgtcttcattgttatgggtaaattgatcagcattgtgtggagtatccagcaaaatgtgctctgcagaagtctcacccttcaactgtacataaccatcctgtggtgttcctctctcctgcccttatattaccccatagcttcctatgcatgattctttcttactatcctcacagtcatttctactgtgctctttggagctgtgattccattgtaaatacattcttttttatcctcaaatctcttcacaaaatgttttcttcatttttttttaattgagacttgtttctctcccaaggtccctcttgcagctgcaagagtacaagcaataactcttcattacctccttcagaacctcacttttcctttctcatgtaagaactccttacacagccacttattaactttcatcattgctgtgatttattagctccctggtaatgcccttcatttattgaggattttagttttccactctaattcttgctatcctcacgtgtgatttcagtgaccatgtggaccgtccaatcaacaacygagtgtcttcaacctccatgtcccratcccttccctttcttcccagtctgttatgtacttcatcattttacttccctgcccatccatcctagactctatggtgaccatttttcacctttgccagtgctctctgggtcctggatttgttttccttatgctaaattccccggaaaaatcctcaaccatctgctttcagttgtagctccttcacacaggctgcatggccctgctggaggaaagagtataattatgggataattgccactaaagatttatggtcttcaatttcaggttgccccttggcactattctgcagtccttctgtgtctttatcacttttctcaaatccccttttctaccaccattttctttttgaacaatcatcttgcctcctatttcatagagaaatttaacactatgaagcttgagcttttctttcctgaaactaacaaacgtttatatctacactgaacctcctttctatatgcttggaggaagagatgtcctcttttctagttcaaagtagtcatctcaactctctcctttgggatgttactccatcagtcatttactctaattcctgaagctctttaattctgcttacttcttccctacagcctgaagataaactcaagtcatactgtcttaaaaagaaaatcaaacaaaaccccaaacgcaactccttcagctttgtcctcttctaactcttatctcctctttccactggaattaaggttctcagtacactacgctgtttgtattttcttttattcataggaataacctaataaaaaaaaatcaaaggaaaactgaagaattactaaaggccaataagcatttgcaaaagtttagcctcactattactcatagaaatgcaaattgcatcaactataagaatatttactcaaaaattagggatttaagagtatggggagatgtttactctygaatattactagtgggaatataaattgatgcaatctttctgaaaagcaatttggtaattgtttaaaccagtaattccactttgggagacttcatgaagaaaatattcagagataaaagtgaaagaatgttcatagaacattatttattgtggcaaaaaaacccttaacagcctaaatgtccaataacagaggcaggcaaggtaccatactctctacatggaaaaaatccaaatccctgttggattttaatggtagttatttcattgtggtaagattgcagttgatttattatctttcttatagttttctataattttctagtttaatttacaagaacatgtattcagaaatataaaaggtatatatattaattcctaatccttctacccccactgtctttgtctttggcaaaagaatggagtaggaatttttgtgaaacagtgtttgtatgtccataagctttcagtatgttccagttgtttttaaattttcttttatgtagtattgatgttcatgatgaaaaggacagggaatgtgatttgcacagggttttccatcaagtatttgaacgataggaacatgttgacctgcacaaagtgttagaggaggaaaagaggaactcttcagtgaatgatgggcggaagcattaaaggagaaggaagagaaccaacctgaaacaagggaaccaatcatctcaagctaagaggaggtaggttcacatcaataatgggtagattgtctcataatattttcactgaatataagactaacagtcaaacagcctttagttaaaagtaaagatgagttggctccttccccagaaaatgtgagaaagtgattagtgacaggagagtatttctcttcagaggcaagaagctgctgctgttggttaaacagagatatccaggatatgtgcttctggttgtagacttttaatttctgactttacagatgtagactgaaacttattatgtgggtcccctggctctgttttttgtttgtaatttatattcatacaagtaatactgtcatatcaaataatggccagtaagtgataaacagaatgttctcaaaaaaggtgaatagcttgtttttcaaaagttcatttgtaagttggttgttttgaacttagagtacattttactatagaaacaacataacagaaaaattagattttaaggctagttcactaaatatttttaacctataatatacttaaagaagaagccagagtgctggaagagttatcaatataattgttgaagtcatagaggatcatgaaaagttggattagaaagagaaaatttgagccaagtgctaaaagaaaatgggagagtgtcccaggaatccacagatggagaggagaagaggataattgaagacttccaaagtggagttccttgaatgataaaactctcaagggcctgcctgattttcctgctacagtagtactgttacgtgcacctggaattgttagtatttacactcactttaagccaaaccctaactttggttaccaggtcaaattgcatttagaacagattttctgaatcttagccacacataaaaattatgtgaggaattttttgaaaacagaggtgcctgggcccatcctagatcaattaactcaaagtctctgcagttggagcccagacactggcattgttttaaaagctccctagattattctaatgcacatgtagaaggaggggtgaactgctggtcagccttagaagtagtaataaattacacaggggtagaaatagtggatgtctattttttctaccattttacctctgcatctagcatacttcttgattattaatggaaattcaatgaatatttgcttgaataaaagagtgaatcaaggactgaggaatgagtggatttaactagctctaatcccatatattacagttcagcattagggcacaatttatggctagtcctttactgactgtgtctcaatttgtacaactggtcttttgtctgattcccaagtaatacctttggtaccccaattcagtccttcttgtttggttactgtttctcagtcattgttgtcaggaacctgccaagaaatgcgatcctctcaagtcagactcactttctaagatccagaatcttggaaatcttgcccctgaatctcagccaagtagttgcgagcgtgtaaatttggctgacgttttgacttcttcagtactactttctccaagattcctcaagagtgtgttctgtttcttccatttcatgctccctcttgttgacttgttgctctggaacgaattgtagttgtaaatgcacagaaagagttctattattcagtaaggcttgttaattatattatttatattttcttcctcattttttacctttattttttgtattgaaagatgtactttaacagctcccacaatatttgaggattacaaagtttcttagtatttctaacagtttttgttttatatgatttactgctctatagtaaataaaaattctttagtgttatgtcttgtgaattattcctttctattaaaaatattcctttttatttttgtcactgttgttggaattcatttttttttcttgatagtattatccctactttctttatgttgtatgcatttacctttgctattgtcttatatttgaccatatttgtcacttaaatttatgcatgcctcttagaaatataatatagctgaattttgatttttattttttatccattatgagaatatttattttcaaattgaagaatttcaacctttcrttttattataagggagacactttaaaaaatgctagccaggtgcagtggctcacgcctgtaatcccagcactttgggaggccgaggtgggtgaatcacgaggtcaggggatcaagaccatcctggctaacacggtgaaacaccgtctctaccaaaaatacaaaaaattagccaggcatggtggtgggcgcctgtaatcccagctacgggaggctgaggcacgagaatggcgtgaacctgggaggcggagcttgcggtgagccgagatcacgccactgcactccagcctgggcaacagagcgagactccgtcgcaaaaaaaaaaaaaaaaaaaatgactaccatcttattttatggtttgtgtttgttgttcttgttttgtgtatatatatgtgtgtgtgtatttacctgtttacaaaggacatacatacacacacatatacatataatacaaatattataaaatacagaaaatctcccgtaatcctatgactcagtgttattgttgatgtgtgggtatggatgtgggtacttctagattctttaaaaaatttttttaataaaaatgaatttatcttgagtatattgctttgtaacctgctaaatatttatgccactaaatatttatccataatatccctttatggttttaaaatacattttaatacaaggtatttataaataagtaagrtaaattactctatactctaagtaggaatatgtagactggtggaaagattatctagttactgaattatatatggaatatgaaaccatttatataaaacatgtttgtatgtatgcatatatatgaattagatgcttctatatgcttgcgtatatttatcaaagacttctttatgcttgaattttaattttattttattcaaaacatttttgcttgatattttagaacttcaagcaaaatttcaagaggatataattgttttacttacgtaataaaaaataaaactaacacattcatttaaaatattcaagcaaatgccaacacattagatagcttagataaaatgaacaaattcttagaaagacagaaactactgaaattgacttgagaaataggatatacttgtaactgaatagacaagtaaagagattaaattggtgcttaaaaaactacccacaaaaacaactcccagccagtatcacttcactgataaattctgtgaaatatttaaagaagaattaatgccaattattcacaactcttccaaaaaatagaagaggaggaaacatgtcccamctcattctacagggtcactatgaccctgatggcaaatccagacaaygatcacaaggaargaaaactgtaggtcaatgtcttttatgaatacatacacaaaatccttaacaaaatactagcaaaccaaatacagcaacatttaaaacataaccaagtgtgatttatcttaggaatgcaaggttggtttgacattgaacagtctattaatataatatgctacaccaaaagaataaaggtgattgtatcagtagacacagaaaaagtatttgacaaaacctgacaatctttcatrataaacacactcaacaaactaggaatagaagaaaacttcctaactcaataaaggacatatgaaaaccgacagctaatgccatatttaatggtgaaaaggcagaatgctttccccaaaacaaagatgtcagttttcaccatttctgttcagcattatgctgatggttctagccaattaggccaaaaaagaaaaaagaaaagaacagaaaatggaaaaaaaataaaagaaagaaaaggcactcagattggaaaggagtgagtaaaactatctctatttgcagatgatatgatcttgtatatagaaaatcctggctgggcatggtggctcacacctgtaatccctgtactttgggaggctaaggtggacggattactcgaggtcaggagtttgtgaccagcctgaccaacatggtgaaaccctgtcactactaaaaatacaaaattagccgggcatagtggtgagcacctgtaatcccagttactcaggaggccgaggcagaagaatcacttgaacctgggaggcggaggttgcagtgagccaaaattgcaccactgcactgcagcctgggtgacagagtgagactccatctaaaaaaaaaaaaatcctaaggaatccagctttaaaaataataacaagttcatcagggttgcagaataaaagatctatacaaaatcaattgtatttctggaagagattgtagaaaatatgtatcattaatttcttaaatttgtggtaaaattcaccagtgaacccatatagggctagtgctttctgttttgtaaggttactaattattgattcagtttctttaatagatataaacctgttctgattatctatttcttcttgtgtgagttggatagattgtatctgttaaggagtttgttcattttatctagattatcaaatttgtgggtatagaattgttcataatattctcttatcctgttaatgtccatgggatcaatagtgatgacctctttttcatttctggttttactaatttctccttctcactttttatcttagttaacctagcaagaggcttatcaatattgttgatcttttcaaataacccgcttttggttttactgattttctctattgatttcctacttctaatttcattgctttctgctctaattttttttcttttcttttgcttactgtagattgtttgctgttccttctttagttccctaagatggaagcttaaatgattggttatagacctttcttcttttctcataaatgtattcaatgctataattttcctataagcacagcttacactgcatcccacatattttgataagttgtattttcattctcatttagttcaaaatatttttaaacttctcttgcattttcttctttgatccatgtgccatttagaagtatgttgtttaatctccaagcattttctgatattctagctatctttccgttattgatttctataattatgctgttgcttgagagcagacattgtattatttctatttttaaaaattagttaagatgtgttttatgggctgggtgcagtggctcacgccaataatcccagcactttgggaggctgaggtgggtgaatcacctgaggtcaggagttcaagaccagcctggtcaacatggtgaaaccctgtctctactaaaaatacaaaaatttgctgggtgtggcagtgcatgcctgtaatcccagctactcaggaggctgaggcaggagaatcacttgaaccygggaagcagaggctgcagtgagccaagatcatgccattacactccagcctgggtgacaagagtgaaactccatctcaaaaaaaaaagaaagaaagaaagaaagaaagaaagaaagaaagaaagaaaacccagcaaagatatgttttatggtctagatgtggtctatcttggtaaatatttcatcttaagaagactgtgtattctgctgtcgttggataaagtagtctatagatgttcattatatccagttgattgatggtgttgttaagttcaactatttccttactaattttctacctgctgggtctgtccatttctaatagaggggtgttgaagtctctaactataataatggatttgtctgtttctctttgaagttctatcagtttttgcctcgtgtattttgatgcactgttgttaggtgcacacacattaaggattgttatgtcctcttggagcattgacccctttatgattgtatagttcccctcttatccctgataattttctttgagctgaagttcactctgtcaaaaattaatacaactacttcagctatcttttgattggtgtcagcatgatatgtgtatcttcattcctttcatttttatctgtatctcttgttatattaaaagtggatttcttgtagacagcatatatttgggtcttgttttttgaaccattctgacaatctctgctttttaagtggcatctttagaccattgacatttaaagtgattattgatataatcactttagtaatagcaaacttgcattgctacttgtaatccaccatagttggattaatatctactacatctgtcattgtattttgtttattgccattggttttttcttttgttttccattattttcctgcctatcttggttttaattgagcattttgtatgattccattttctctatacacttaccataatcatttggcaaagtacaattatacttctttacttctttttctttttttaattattatactctaagttctgggatacatgtgcagaacatgcaggtttgttacataggtatacacgtgccatggtggtttgctgcacccatcaacccattatctacattaggtatttctcctgatgctatctctcccctagcccccaacaccctgacaggccccaatgtgtgatgttgccctccctatgtccatgtgttctcattgttcaactcccacttatgagtgagaacatgcagtgtttggttttctgttcctgtgttagtttgctgagaatgatggtttccagcttcatccatgtccctgcaaaagacataaactcatccttttttatggctacatagtattccatgatgtatatgtgccacattttcttcgttcagtctatcattgatgggcatttgggttggttccaagtctttgctattgtgaacagtgctgcaataaacatacgtgtacatatgtctttatagtagaatgatttataatcctttgagtatatacccagtaatgggattgctgggccaaatggtatttctggttctagatccttgaggaattgccacactgtcttccacaatggttgaactaaatttacactcctaccaacagtgtaaaagcattcctatttctctacatcctctccagcatctgttgtttcctaactttttgatgatcaccattctaactggtgtgagatggtatctcattgtggttttgatttgcatttctctaatgatcagtgatgatgagctttttttcatatgtttgttggccacataaatgtcttcttttgtgaaatgtctgttcatatccttcgcccactttttgatggggtttgtttttttcttgtaaatttgtttaagctccttgtggattctggatattagccatttgtcagatggatagatggcaaaaattttctcccattctgtaggttgcctgttcactctgatgatggtttcttttactgtgcacaagctctttagtttaattagatcccatttgtcaattttggcttttgttgccattgcttttggtgttttagtcatgaagtctttgcccatgagtatgtctgaatggtattgcctagatttccttctagtgtttttatggttttaggtgcttacatttaagcctctaattcatcttgagttaatttttgtataaggtgtaaggaagggttcggtttcagttttctccatatggctacccagttttcccaacaccatctattaaatagggagtctgttccccattgcttgtttttgtcaggtttgtcaaagatcagagggttgtaggtgtgtggcgttatttctgaggcctctgttctgttctcttggtctatatatcaattttggtaccagtaccatgctgttttggttactgtagccttatagtatagtttgaagtcaggtagtgtgatgcctccagctttgttctttttgcttaggattgtcttggctatagggctgttttttggttccatatgaaacttaaagtagttgtttctaattttgtgaagaaagtcaatggtagcttgatggagatagcattgaatccataaattactttgagccgtacggccattttcatgatattgattcttcctatccatgagcatggaatgtttttccctttgtttgtgtcctctcttatttccttgagcagtggtttgtagttctccttgacagggtccttcacaaccattgtaagttgttttcctaggtattttattctctttgtacctattgtgaatgggagttcactcatgatttggctgtttgtctatttttgttgtataggaatgcttgtgatttttgcacrttgattttgtatcctgagactttgctgaagttgcttatcagtttaaggagattttgggctgagatgatgaggttttctaaatatacaatcatgtcatctgcaaacagagacaatttgactttctgtcttcctatttgaatacctttatttccttctcttgcctgattgcccaggccagaacttccaatactatgttgaataggagtggtgagagagggcatccttgtcttgtgctggttgtcaaagggaatgcttccagtttttgcccattcagtatgatattgactgtgggtttgtcataaatagctcttattattttgagatacattctgtgaatacctagtttattgagagtttttagcatgaaggggtgttgaattttatcaaaggccttttctgcatctattgagataatcatgtgttttttgtcattggttctctctatgtgatggattatgtttattgatttgcacatgtcgaaccagccttgcatcccagggatgaagccgacttgatcatggtggggaagctttttgatgtgttgctggatttggtttgccagtattttattgaggattttcacattgatgttcatcagggatattggcctgaaattttctttttttgttgtgtctctgccaggttttggtatgaggatgatgctggcctcataaagtgagttagggaggagtccctctttttctattgtttggaatartttcagaaggaatggtactagctcctgtttgtacctctggtagaattcatcagtgaatccatctggtcctgggcttttttttttttttggttggtaggctattaattattgccccaatttcagaacctgttattggtctattcagagattcaacttcttcctggtttagtcttgggagggtgtatatgtccaggaatttatccatttcttctagattttctagcttatttttgtagcagtgtttgtagtattctctgatggtagtttgtatttctgtgggatcagtggtgatatcccctttatcattttttattgtgtctatttgattcttctcccttttcttctttattaatcaggctagtggtctatctattttgttattcttttcaaaaaaccagctcctggattcattgatttttttgaagggttttttgtgtctttatctccttcagttctgctcggatcttagttatttcttgtcttctgctagcttttgaatttgtttgctcttgcttctctggttcttttaattgtgatgttagggtgtcggttttagatctttcctgctttctcytgtgggcatttagtgctataaatttccgtctaaacactgctttagctrtgtcccagagattctggtacactgtgtctttgttctcattggtttcaaagaacttctttatttctgcctgaatgtcattatttacccagtagccattcaggagcaggttgttcagtttccatgtagttgtacagttgtgagtgagtttcttaacctgagttctgattggattacactgtggtctgagagactgtttgttatgatttctgttcttttgcatttgctgaggagtgttttacttccaattatgtggtcagtttcagaataagtgtgatgaggtgctgagaagaatgtatattctgttgatttggggtggagagttctgtggatgtctattaggtccacttggtccagagctgagttcaagtcccaaatatccttgttaattttctgtcttgtggatctgtctaatattggcagtggggtgttaatgtctcccactattattgtatgggagtctaaatctctttgtaggtctctaagaacttgctttatgaatctgggtgctcctgtattgggtgcatatatgtttaggatacttagctcttcttgttgcattgattcctttacgattatgtaatgcccttctatgtatctttcgatctttgttggtttaaagtctgttttatcagagactagcattacaacccctgctttttttgctttccatttgcttggtaaatcttcctccatccttttattttgagcttatatgtgtctttgcacgtgagatgggtatcctgaatacagcacactgatgggtcttaactctttatccaatttgctagtctgtgtcttttaattggggcatttaacccatttacatgtaaagttaatattgttatgtgtgtatttgatcctgtcattatgatgctagctgattattttgtccattagttgatgcagtttcttcatagcgttgatggtctttacaatttggtatgtttttgcagtggctggtaccggttgttcctttccatatttagtacttccttcaggagctcttataaggcaagcctggtgatgacaaaaatctctcagaatttgcttgtctgtagaggattttatttcttttttgcttatgaagcttagtttggctggatatgaaattctcagtttaaaattcttttctttaagaatgttgaatattgacccccactctcttctggcttgtagagtttctgcagaaagatctgctgttagtctgatgggcttccctttgtgagtaacctgacctttctctctggctgcccttaacattttttccttcatttcaaccttggtgaatctggcgattatgtgtcttggggttgctcttctcaaggagtatctttgtggtgttctctgtatttcctgaatttgaatgttggcctggcttsctaggttggggaagttctcctggatattttcctgaagagtgttttccaacttagttccattctccccatcactttcgggtacaccagtcaaacgtaggttgggtcttttcatatagtcccatatttcttggaggctttgatcattccttttcagtcttttgtctctaatcttgtcttcatgctttatttcattaagttgatcttcagtcactgatatcttttcttctacttgatcgatttggctattgacacttgtgtatgcttcacgaagttcttgcgctgtgtttttcaggtccatcggggtcacttatgttcttctctaaactggttattctagttagcatttcctgtaacctttcttcaaggwtcttagcttccttacattgagttagaacatgcttctttagctcgaggagtttattattacccaccttctgaagcctacttctgtcaattcatcaaactcattctccatccagtttgttttcttgctggcaaaaagttgtgatcctttggaggagaagaggcattctggtttttggaattttcagccattttgcgctggtttttccccatcttcgtggatttatctacctttgatgttggtgacctttggatggggttttggtgtggacatcctttttgttgatgttgatgctattcctccctgttagtttttcttctaacattcaggctcctctgctgcaagtctgctggagtttgctggaggtccactccagaccctgtttgcttgggtatcactagcagaggctgcagaacagcaaagattgctgcctgttcgttcctctggaagcttcatcccagaggggcactcgccagatgccagccagagctctcctgtatgaggtgtctgtcgacctctgctaagaagtgtctcccagtcaggaggcacagagttcagggactcacttgaggaggcagtctgtcccttacagagctcaagcactgctccaggagatctgctgctctcttcagagctggcaggcaggaacgtttaagtctgctgaagctgtgcccacagcagctccttcccccaggtgctctgtcccagggagatggcagttttatctgtaagcccatgactggggctgctgcctttctttcagagattccctgcccagagaggaggaakctagacaggyagtcttggctacagtggctttgccaagttgcggtgggctctgccaagtttgaaatttctggcggctttgtttacactgtgaggggaaaactgcctactcaagcctcagtaatggtggacgcccctccccccaccaagctcaagcttcccagttcaacttcggactgctgtgctggcagcgagaattttgagccagtggatcttaacttgctgggctccattggggtgagatccactgagctagaccacttggcttcctggcttcagcccactttccaggggacagaacagttctgtctcattcttgttctgggtgccactggggtatgaaaaaaaactcctgcagcagcttggtgtctgcccaaatggccacccagttttgtgcttgaatctcagggctctggtggtgtaggcacctgagggaatctcctggtctgtgggttgtgaagaccatggaaaacacgcagtatctgtgccagagtgcagcgttcctcatggcgcagtccctcatggcttcccttggctaggggagggagttccctgaccccttctgcttcctgggtcaagtgacaccccaccctgcttcagctccccctccatgggttgcacccactatctaaccagtcccagtgagatgagccaggtacctcagttggaaatgcagaaatcacctgccttctgcattgatcttgctggaagctgcagaccggagctgttcctatttgatcatcttgccagccacctctttttcttttttagagatagagtttcaccatgttgcccagactgagggcaggtgctattcacaagtacaatcatagtgcactacaatctcaaattcctgtgctcaagttattttcttgcttcaccttttcaaatagctgggactataggtgtgccactgtgcccagctctggttaacttttttagtggttgccctggagtttgcaatatacatttacaactaatccaaacccactttcaaataacaccataccactttgtgggtaacaaaatgcattattgcagaatattcccaaatatttcctgtcatcccttttgtcattgctgtcattcatttcactcatcagtaagttataaacactgaatgcaagtgatttacttgtatttactattattattatgaacaaactgctatccattagataaagaaaagaaaaacatttcttacctacatttattcctcctaatgctctttgtttacatagatctgagtttctgatttatatcattttccttttctctgaagaatgtcttttaacatttcttgcaagtcaggttactggcaacaaattacttcaattaaaaaatttttgttctatgtggtgtatagcatgatgttttgaaatatgtatacattgtggaatgactaagtcaagctaattaatatatacataccacttctttgtggtgagaacacttaaaatctactctctttgcaattttctcaagtatacaatacattgttattaattattgtcttcatgttgcacaatagagctctagaacttgttatttctgtataactgaaattttgtatactttgcccaacatttccccaattcctcccaacccctgactaccagcccctgataactaaccttctactcaactttttttttttttttagacagagtctcagtctgttgcccaggctggagtgcagtggtgcagtcttggctcactgaaagcctcctgggttcaagcaattctcctgcttcagcctcccaagtcgctgggattacaggtgtgygccaccatgcctggctaatttttttgtatttttcgtagagacgggtttcaccatgttgaccaggctagtcttgaactcatgacctcaagtgatctgcctgcctcagcctcccaaagtacagggattacaggcatgagccaccatacctggcttacttaacttctataaactcaactttttaagattccacatataagtgagatcatgcagtatttgtctttccattcctggcttaagtttacataatgtcctctaggttcgtctatgttgttgtccctaatgacagagtttctttcttttttaaggccgaatagtattctatcatatatatatatatcatatatgatatatatatatacaccacatattccttatccagtcattcattgaaagagaacaatataattccattccatatcttggctattatgagtaatgctgtagtgtacctagaggtgcaactatctcttcaacatactcacttcatattttttggatacataccccagtagtgggatttctggatcatatggtagttgttttttatttttaggggaacctcaatactgttttctgtaaggtctatactaattcccaccaacagtgtaccgtgttcccttctctccacattcttaccaacacttttatctttcaccttcttgataatagccatcctagcaggtatgagatgatatctctttgtggtttgggtttgcattttcctgatgattagtgatgttgagcatttttttcatatatttgttggccatttgtatgtctacatttgagaaatatctattcatgtcttttgctcatttttaaattgggttatttattttcttatttgagttttttatatattttggatattaacttcttatcagatataaaatttgtaaatattttctcttgttctataggttgtctcttcactctgttgattgctttcttttctgtgcaggagctttttagtttgatgtgatcccatttgtttatttttcttttgttgcctgtgtttttggagtcatatccaaaacacactgtccagataagtgtcatcgagctttctctctgtgttttattcaagtagttttacagtttcaagttttacatttaagtctttaatccagtctgagttagtttttgcatatggtgtgagatgagtccagtttcattctgccacatggctataatctaacaacaaactatccaaaaagaaatcaagaaaactatcccatttgccatagctactaaaaagctaaaatacttaggaataaatttaactaaagaagtgaaaggtctgtgcactgaaaactataaaacgttcatgaaaggaattgaagaacaattagatagaaaaatatcctgtgttcatgggttggaagaattaatactgttaaaatgtctgtatacccaaaactatctacagagtcaatgcaatgtctttcaaaatccaaataacatttttcacagaaatagaaaaaataaccttaaaatttatatggaagcacaagagaccctgaataaccaaagcaatcttgagcaaaaggaacaaagattgcagcatcacaccacctggtttcaaaatttactacaaatctatgctatggtttgaatgtttgtgtcctccccaatatttatgttgaaactttatctccaatgccataatgttaagagctggggtcatttaggaagctctgccttcaagtgtaggattaatgccttatacaagaattagagggaactagctaggtccattttgcctttttgtgttacactgtgtgaggacctggcacccgaggcactatcttggaagcagagagagccagccgtcattagaaattgaatctgccagtgccttgatcttggacttcccagcctccagaactgtgagaaattaatttctgttctttataaaattatctggtctaagatattttgttatagcagtgggaatgggctaagacactatactaatcaaaacatcatagtactagcataaaaacagacacataggccaatggagcagtgtagagagtccagaactaaatctatgcatttatagtctattgacttttgacatagatgccaaaaacacacaatgggaaaggacagtcttttcaataaatggttttgaaaaaccgcaatttttttttttggtctaagaaagtctttattactttctcacattttttctcaatttaaaatctttcagagtacagtattctgtcctggtatgttttttttttttcttttaacactttaaatatttcactctgctctcttcattgtatggtttttgaggagaagtctgacgcaattcttatccttgttccagctgtaggtaaagtgttttttcccttctagcttctttcaaaaatttctctgtcttggatttctgcaatttgaatacgatattgccagacatagatttttttggtatttatccttcttggtattctctgagcttcctggatatatggtttggtgtctgtcattaattttggaaaatcctcagccattattactttaaacattttctctgttcctttttgtcttctccttctgctattcctattaaataaatgtgacacccctttaaaattatcccacagttcttagatattctgttctgtctttttcacttttttccctttgcatttattgttttggaggtttctattgacctttctttaaactcccagattctttcctcagttgtgtctagtctgttgatgagcgcataaaaaggactcttcatttttgccatagtgcttttgacttctggcatttttctttgattctttcttagagtttccattgctttgcttacattatcatctgttcttgcaacgttgctttttttttttccattagagcatgttaactatagttgttttaaattcctggtctgattattagaaaatctctgtcctatctgagtctggttctgatgcttgctctatctcttcaaaatgtgcttttgtcttctagtatggctttttgtttttttaagatggtgtcttactctgtcacccaggctggagtgcaatggtgcgatctcagctcactgcaacctccacctccccggttgaagcaattctcctgactcagcctcccaagtagctgggattacagatgcctgccactatgcccagctaatttttgtacttttggttgagatgggatttcaccatattggccaggctggtctcgaactcctgacctcgtgatccacccacctcagcctcccaaagtgctgggattacaggcgtgagccaccggccttatcttttttgttgttgaaagctgaatttgatatactggataaaaggaactgaggtagtaggcctttagtgtgaagtttcatgtttatctgactaggaggtagactgcatttactattttctgtggctagagacttcttaaatatggtttgagatgtgtagttctttcggttgtaatcttttgttattatacaggagcccttctgatcttgtggtaagatatggggacggggagtgcattctatagacccacaattaggtctccgactttcagtgagcctgcgcccttgggctgtgacttctcagtctcacccttccccatttgatgagacaacaaagctagaaagggccagaattggttatttcccttccccaacagagaaggctggagtgggctggagttgggtattttctttctctgagattgattaggctctaataaatgacaaattgattaggctctggtaaaatactttctcatgagggcaggccttgttaaaaataacacaatcatctgggtgtatttaaaaatggctactttccccttccccctgctggaatcacaagcggacttttctgtgatcttcactgtgacaacctggtagggcttctagaggtaaaacatatgaaagtgtgtcccttccttccaaaaatgggcctctctggagttttaaactcttaaacttgctcacactgaacctccagcaatctgttaattacagcaatatattatatatatatatacacaaaatacatattatacctatatatctatatacgtgtgtgtgtgtttgtgtgtgtatatacacacacacacatacacatacacactgtcatgaataatttaatcatcagaatacattctgagaaacacgttgttaggcaattttgtcattgtgcaaacatcatagagtatacttaaacctagattgtgtagcctactacacacctaggctatgtaatatagtctattgctcctaggctacaaatctgtataccatattactgtattgaatactgtaggaaattgtagcacagtgttaagtatttgtgtatctatacttatatagatacacaagatacacttatatagataaagtatagtcaaaatatggcattataatcttaggggaccactgttgtatatgtggttccagttgttgactgaaatgtcattatgtggcattatgactgtataattttaccttttcctctcttttgccttttcaggttctttaaaataattgagaatttgcttccagattattagtaatttttttcttaacaaaatacctcatccatctatacaatcctttttatgtgttacattatacttcaaagccatattatcaagagttatctagatttattataaaaataacttttatgagttttatttatcatagctgttccttagtaagtcatctacttgagctttatattctgatttttaagaaacagaatgcttagaatcagaacaggagtggtaatgagtacttccatgccttgttataaacacttttggtaattgttgccaaattcttttccagaaaatttgtgctgatttaacttccatctggattttatgggtgtttcaatttttccattccctcttttttcaatattgaatattttcattctttatgatatctggcgtgttgtatttgaaacctagtttgtcatttatgttttaattgcattatttaattattgagtttaaattttataatgtaattattcaactttttttatttcatgtattgccagtttatgtcatttgtgtatttttctattggggtatttatgtactttattgctttgtaagattgctttatatattaaggatattagatcatcttattttatctggttgatatgtttttagatttatttatgttgttttctgtttggcaccagatcaatgcttgttggcattttgttagggaaatggttaggagcatggactttgtattcaaactctagcacaggccaggtgtggtggctcatgcctataattccagcactttgggaggccgaggcaggcggatcacttgaggccagcctggacaacagagtgaaaccctgtctctacaaaaaaatacaaaaaattagctgagtgtcgtggcatgcacctatagtcacagctacttggggggctgaggtgggaggcttgctggagcctaggaggttgaggctgcagtgagctaagatcgctccactacactccagcctgggtgacagagtgagactctgtctcaaaaaagaaaccccagctcagcaacttgctcattgtgtaatcttgggaaattgcttaataacttttagctcttgctaaaactgatataaaacaatagtgccaacttcatggggttgttgagagagattacttaaaaggtttagcataatatctgtcataatttagtaaacactcaatcatttctggctgttactgtttgtatatttttaaacagtgaccaaagcagaaataaagggaatgatgtgaaattaatgaatatgtaagttatatttgctgccctctctggccttttcacatgtacctttccctctgtgaaactaccccacccccacccttttatggggtagcgtatttgatatataatcttattctcattttgtttaatgtcttgggaatgtgttgaatactctttgtgtaggttttcatttaggtatacttttcaaatatgtaaataaagctcagtaaatagaggcctgttttcagattcagtgtatactttaactaagtttcttttcctacttatataacagtggcaattattgaagtgggacatacatcaagtgaataaacgggtgtttccagctctgaatatgccatgaagaccttacttatttttttgattagtgacatttttctcttccaaaagtttagaggaatgggaatgtgagccttccatggggaagtcttacttgtgttgttactttttatatgttttacatatctgtctattctgtggttgaataaaatatgtccttcctatgaccaccagtgcaacttttgtacatatgctacccattatactcagatctcctttttaaaacctcacaagtagaaaggaatgtaaaatttgtactcttttacctttgaaaaacttgcaataatcaccatatctttatgatcgttagattagcaaacggttaaatcctcatgaaattctctttataagctgtttgtagttttcaggcattcaatcattcatgccttatggaaggcaaaaaaacattggttattgatgaaatagaagtaagatagaatcactgttgtattgctactcagtctattaatgcagaattaagctagatttataatatatatacagtatatttatatttaatatatactaaaatataatatgtgtaatatgactataaatttatactatatacttatgtttttatatagatttatttaatatttagatttatatgtatataaaaaacataggatgtgatttttcattatttgtttttacaggaacagaatgctagtgcttgaaaaaggaacataaaagatcatatagtacaacactctcattttataaataataagcttagacaggcagcatatagcttactcaagatctcatgtgggagaacctattgaagaatccagggctgtgttcatgagaccgcacttcctatgactatagtcatgttttcactcaatttcaagccctttttattttaactttatttttaatttcayagttatttctttacatggttaagccagttcaagattttcctattcaataacttgacagatttcctttaaacaagagccatcttattagacactgaagctattaaaaaaattaaggttgctttcactgaaaatgtgcaaaaacaaccaccctggtacttgcagtgttacgtatattcccatcttatggccctaatagaagaataagtagttactttatttctccttcacctatccccttcaggaggtgtcctgccacatgcctgttgtggactttcaaattgtgtgctgtattcaaaggaactcaagaccatcatagttaagttgggctcaatagttaagattgaaaatgatgttttaatagctgcatctttcttattaaacaacatattaaaaatacagctagctctgtgtaattacattgatcattgtaccccctggataatactattaggttggtgcaaaagtagttgtggtttttgccattgaaagaatggcaaaaacgcaattactttagcaccaacctagtaattttctttcccactctttgagaggtgtatggtttggcagtctctatggtaagttgttctattagtccattctcatgctgctataaagaactgtccaaaactgggtaatttataaaggaaagaggtttaattggctcacagtttagcatggctggggaggcctcaggaaccttcaatcatggcggaaggtaaaggggaagcaaggcactttctttgcaaggtggcaggaaggagaagtgccgagtgaggggggaagagcactttataaaaccatcagatctctgagaactcacttgctattatgagaacagcatgggcgaaactgcccccacgattcagttaactccatctggtccctcccttgacacgtggggatgatggcgattacaattcacgatgagatttggatgcagacacagagccaaaccatatcagttgttcttaagaaatcctacactcacctcttggtaattagtgcttaccctatgtcaacagtgtctcttcaaattgctaaaaggtcagaatgtacataaggtattaagatgaacccatctcctgactgagagaaaaggcaggcttaagctaccagtgtttagtggcatatatctcttatgtggaaaggccaagatatttgcttccatcatctttatgctaactccatgaatatctagcagatagtaggtgctttgtcataaatactcttgaggtcagcatccttctttgcttggttgcctggcctcctatgataaaagcaaatgcctgattagttgttgcctgacagccctcagtaaaggatataacttgggataactttttagtactgttctttggctctgagatgttctcgttcctgttttagcttattctcttcttttgctccatgaactctagtctttcttcatagattaatttcatccctcattcagtaatcctaaatattttttcagtgctttactatgtgacaatcactgttattggtgcttgatgtacgttagtaaacaaaacagacaaaaatctcctcacttgtggatcttaaattctagttgggggcaggagacaggcagacaattaaagaaatgcatactaaatatctacattttacaacatattaggaggtaactgctattaaaaaaacccagcagagtaagggggattgggaatgctagggaagacaggggtacagtcacrgtttcaataggtcagagtaggtctcagggagaagaagacatgtaagcaaacatatgcagaagaaagggaagctgacaatgtagatattctgggggaaaatggtacaaaggccttatgataaatgtatacctggtttttaagaagaacagagaagcaggccagtattgctgtagttgagggaggtggaggagggtagcaggaggtcatagaggaaatgaaggtcaggtcctgtagggcattttaggccactgtgaacacattggattttactctgagtaaaacaggaaaccaccagatggttttgaatagaggagtgacatggtatgacttctatctttaaaagctcactttggctgttatatacagaataggctatagagagccacatatgaaagcatagagaataattagaaggctgttacagtaatacggcctggggagaatggtagctcacatcagatggtagcagctataggaatgaggtatggtagatttccagatagacagtcatgcatctcataatcacatttcagtcaatgactggaccacatataacaatggtggtcccataagattataatatcatatttttgctttactttttctatgtttagatatgtttagatacacaaatacttatgattgtgctacaatcacctaccgtattcagtacagcaacatgccgtgcaggtttgtagcctaggagcaatgggcgatagcatgtagtcgaggtgtgtagcaggtataccgtctatgtttatgtaaatttactctgtgacatttatataacaacaaaataggctaacagcacatttctcagaacacatccccatccgtaagcaacatgtgactgtaatttaaacatggagccaatagtatttcccaataggaaatgagttgtgtgagaaaggagtcaaggaaaacctcaaggtttctggcctcagcaaccagaaatatgaaattgcagcaattaaaatgaggaagatttcaggtagaataagttcaggtggggcctgggggagtggtgagggaaatcagtaattcagttttgaacatattaatttagaggtgcttgtaagtcatccccatggaaatgttatataaatgttggagtttagaagagaaaattagagataaaaatttgagagtcataagatatacaggtgatatataaagccctgagagtgactaagataaccactggggaaaggcttttgttagagatcaggatcagagtcagcctgggggcattgcaatatttagaagttggggaaagaggaggaaccagcaaaggatacagggagggagtagctgtgagataggaggaaattcaagaagacaacagtatcttccaagcaaaagtggtaagctcatactctttaggatgctttataatttgaccaaacccctctgcttccaagtgaggtcattgcaattttactgaatttcctggtttctcaggagaggaatttctttccatgagctatgagaaagctgatttagagtctctccacctgttctgacagcagcctcagatggctgtctggagttttgagagatgtttgamagaaggccatagactcttgaagtttgtagctagcaacctacaggaaggacagattcatatatcccatagatagcacctgggttagggtcctgatcaacactgtttcagactgtgtaggtcctgaggcacaagattgaaatttctgctggtcttacaagagaatttagggaaattggaataagcatttgttgaactggtaaatgaaatttctgctggtcttacaagagaatttagggaaattggaataagcatttgttgaactggtaaaatataaggttgtatactcaatatgcttctaccattgtgtcaagggtgtgattctcttctgttttctggtccaaaaattagactgaaagaaaggtagactgaatagtccctggaagggtttaccagccccatcctagatcaactgcctttcatgaccttaaaagactgatggatttaaccctcacttctgcccctggcaggcttatagtgccaagttgtggtttgcaaactctaagaccaacacctaaggattgcatccctggccaccagatcaaagtccagagagcaatgccaagtcaaaatctagcactatttgtgtgtgtgcttgggtaaggtgggatctccagggaggtggacaaagttcactatatatacaaagtgagtcaacagttacagaggataaggcatgaagcagcccagaggcatcttacaaatggtttgcttgttgtcttagtcaacttggatacatcttaaaggaagccaatcctttggtacaactttgcctttgttttttcccatttctaaatcaacacctggggaaatgttccccattaattgctagctccatatcattcttgcctgtgtacatacatctcttctccactgctcagaacacaggaagacttaccctggttgtgattctatctcctcgttctaaacagagtcctggaatttgaaaaacacctatccattaggtactgcaggaatctttgtgaycccatgtaacaatgtatagatgtgttgcttaatgatgggagtacgtctgaagaagtctctcattaggtgattttgtcattgtgtgaacattggagagcatatacaaacctagatgggatagcctactacacacctgggctctgtggtatagcctattgcttttaggctactaacctccacaacatgttaccgtactgaacactgtaggcagttgtaactggttaagtctttatgtatctgaacagatctaaacatagaaaaggtaatgcattgcactaagacgttacaatggctaagatgtcactaggtgtaggactttttcagatccattataatattacggtaccaccatcatatatgcagtccatagttgacctaactgttgttacttagcatgtaatcctttgtgacacttatgataggaatatgtactggtggggaaacgtgaaggcctacagttgcccttctattgccaactcgatagtgtgtagccttggattctctttctattttggccctgcttgggtttcagtacatcttggtttgtattggtgaagtcacatatatgatccattttatcccctgctcagacaacacaagcactacagacacaatgtacctctttctttaataaaatgaaaaagtactgtgtcctttttaatagattctagtttactttctgattctagaagaccctctttactactttccaaatcaagacacatttgttcaactataagatcatggtttatttatttttattatgaattgtaatcagtattttacctctgcctcagatatttgtcctataatacttagtctaattggtgtttgcccctcattaagggaattaatgacattagcaggtaggaaaatgaggaatagtccttgagaactctatctctaacctttactgtgttaataagaagataatagattaaaatagcttattttattttgttaatttccttttttaactgacaagtaaaaattgtatataattatggtgtacaacatggtgttctgatataggtatgtgttgtggaatggctaaatcaarctatttttaacatatgcattacctcacatatttattattttggtgaaaatacttaaaatctactctcttagcaattctcaagcataccataggttgttatttactgtagtcaccatgatgtacaataggtctcttgaacttatttctcctaactgaaattttgtgtctttgaccaacatctccccaaactccttccccttacccttggtaaccaccattctactctgtttttgtgagttgaaatttattagattccatatataagttagatcatgtggtatttgtctttctgtgcctggcttgtttcaattaacataacatccttcaggttcttctaagttgttcaaatgacaggattttcttctttataaaggatgaatagcatttccttgtgtgattatataccacattctctatccatttatctactgatggacatttaggttgattcccacatcttagttattgtgaataatgctgcaataaacatgggagtgcagatatctcaacagactgatttcatttcctttggatatgtactcagtagtgggttgctggatcatatggtagatctgttttcaattttttatcataatggctgtgctaatttacattctccccaacagtgtacaaaggttcccttttctccacgtcttcactggatcttgggacggagttttgctcttgtcacccaggctggagtgcaatggcaygatcctggctcactgcagcctctgcctcccaggttcaagtgattctcctccctcagcctcccaaatrggkgggattacaggagcaagtcaccacacccagctaatttttgtatttttagtagaaacagggttttgggaagttatctatcaagtcctttgcccgtttttaaattgggttatttgttatcttattattgacttgttggagttccttatgttatgtttcgtatattacactcttatcagatgtgaggtttgcaaagattttcttctatcctataggttgtctctttgttgtttcctttgctgtgcagaaactttttagttgatataatgctatctatttttgcctttgttgcttgtgtttttggagttatatccaaaaaaattattgcccagatcaatgtcatggagcttttccctgttttgttctcgtagttttacagtttcagatcttatttttacatctctaatccattttgagttttttttttttaacctctgaactttttattggcttccagctccccagagagtaccctgcttctgctggcttaatgtctcagaactttggtgtcattgatctcagacaccactttgccatccactgtctggcgggtggtggtcttttggatggtttgcatggagttactgctgtccaaggcatcaccaagactgaagtccttgatgtcttctggcaggcagtgatacatggcaatctcagcctccagcttgaccttaatgttcagcagggcctcctactcctgggcctggtgctgcccctctgcccgggtctgtgtcaactccaactccaggtgcagcaggatcccgttgagttgctccatctgcagggtgtaccaggcctccacctccctcaggctgttctccaagctggccttcagatttctcatggagtccaggtcagtctccgaggactgggctgtatgttacagctcatctgttgagagcatcatctcaacagctccaaccttggccaactgcatggtgaccactgtggtactctccttaatctgctgagaccagtatttgtccagcccttctcagttcttccgagccagctcgtcatattgggcccagatgtctgccatgatcttggcaaggtcctgagatttgggggcatctacctccaagatcaaaccagagctgacaatctgggcttgtaggccttttacttcctcttcatggttcttcttcattaagagcagctcctccttgagagtctcgatctctgtcttcagctgcagctgagtgacactggtgtcatcaatgaccttgcagagcccatagatgtcgctctccacagactggcgcatggccagctctgtgtcatacttgactctaaaggcatcagcagcaagatgggcattgtcgatctgcagaacaatgtggacattgtccacagtatttgtgaagatatgagccctcaggtcctcgatggtcttgaaataatggacccagtctctgacctggggtcctgtcttctccaggtgctcccagattttactctccaccttccagttcttggtctctgggctcctcactctgtccaggtagtaggccaggcggtcttcaggctttgcatggtctccttctcattctggatgcctcccattcctgccagacccctagccatccctccggccaggcccctggaccccaagcagccccggaagctggtggagcaggacatggagatccgggaaccagagcccccagtgcctgcatagacgttggttgkgctgctgaccagccaggtgccatagctgggcacctggatggagcccagggatgggtwggtagttggtggacaaggtggagcgagtggtgaagctcatgctgtctggggaagagagcgggaagagaggactcaggctttgctgataaccttgagttttgtatggtgtgagatgaggctctaattttattcttctgaatgtggatatctagttttctcagcaccactgaagagaatatcctttcctcattgtgtgttcttggcatctttttcaaaaataaattgagcataaacttggactttctattttattccattggtctatgtgtgtgtttttatgccagtaccatgctgttttgtttactcttgctttgtagcagattttaaaatctggtaatgtgatgccttcagctattttttttttccttatgattggtctggctatatgggagtcacttgtggtttcatgcaagttttaagattttttttttctatttctgtttaatatgtcactggaattgttaaaaatctttatttttttaaatttttaattaaaaaaacttttatttaagtttgggggtacacttgaaggtttgttatataggtaaactcatgtcacaggggcttgctgtacagagtattttgtcacccaggtactaagcctagtgcccaatagtgatttttcctgatcctttccctcctcctgccctgctccctcaagtaggccccagtgtctgttgtttctctctttgtgttcttgtgttctcatcatttagctcccacttataagtgagaacgtgcagtatttggttttctgttcttgtgtgctaaggataatggcctccagctccatccatgtttctgcatatgacatggtcttgttttcttatggcttcatagtattccatggaatatatgtgccgcattttctttatccaatctaccaatgatgggcatttaggctgattcagtgtctttgctattgtgaatagtgctgcagtgaacattagtgtgcatgtgtctttatggtggaatgatttatattcctttggtatatcagtagtgaaactgctgggtgtaatggtagttccacttttagctcttyaaggcattgccacactgctttccacaatggttaaactcttttacactctcaccaacagtgtataagcattcctttttttctgmaaccttgccagcatgttatattttaacttttaaataatgtcctttctgactcatgtgaggtggtatctcattgtggttttgatttgcatttctctaatgatcagcactattgacctttttttcatgcttgttgaccacatacatgtcttcttttgaaaagtgtctgttcatatcctttgcccactttttaatgtggttgtttgtttttttcttgtacatttgtttaagtttcttacaggtgctggctattgggcctttgtcagatgcatagtttgcaaatattttctcccactctgtaggttatctgtttactctgttgatagtttcttttgctgtgcagaagctcttaagtttaattagatctcatttgtcagtttttgcttttgttgtgattgcatttggcatcttcatcatgaaatttttggcagtttctatgtccagaatggtattgcctacgttgtcttgcagggtttttatagttttgggttttacacttaattttatatccagctaaactaagcttcttcagtgaaggagaaataagatctttttcagagaagcaaatgctgaggaagtttttttacctccagacctgccttataagagatcctgaaaggagcactaaatatggaaaggaaagaccattaccagctgatgcaaaaacacatttaagtacacagactagtgacactacagggcaaccacacaaacaagttggcataataagcagttaacaacacaatgacaggatcaaatccacacatgtcaacactaaccttgaatgtaaacaggctaaatttcccatttaaaaggcacagaatggcaagctggataaagaaacaagactcaatggtatgctttcttcaagagacccatctaacatgcaacgacatgcataggctcaaaataaagggatggaggaaaacctaccaagcaaatggaaatcggaaaaaagcaggggttgcaatcctatttttagacaaaacaaactttaaaccaacaaagatcaaaaaagacaaagaagggcattacataatggcaaagggctcaattcaataagacctaactattccaaatatatatgcacccaacccaggagcacccagattcataaagcaagtccttagagacctacaaagagacttagactcccacacaatagtagggtaagacttcagcacttcattgccagtattagacagataatcgaggtagaaaattaacaaagatatttaggacctgaaaatgtttaatttttaatttttgggagtacatagwatatatatatatatatatatatatatatatatatatatatttatttatttatttatttatggggtatatgggatatttttatgtaggcatacaatgtgtgataatcacatcagggtaaatggggtatccatcacctcatgcatttatcctttgtgttagaaacaatccaattatacccttttaggtatttttaaatgtataattaaattattattgaaattttgatggtgattgcattaagtctgtagatggctgtgggtagtatgaatatttgaacaatattaattcttttaatccgtgaacataggatatctttctgtttatttgtttcttcaatattttaaatcaatgttttatagttttcagggtacagatctttcacctccattgttaaatttatttctaagtattttatttgttattgtaaatggaatagttttcttgctttcttttttgagtggytcattattagtgtatagaaatgtaactgagtttcgtatgttgattttgtatccacccactttactgaatttattagttttaacaggtttttggtggcatctttagggttttcttttttttttttttttttgagacagagtctcactcttgttgcccaggctggagtgcaatggtgcaatcttggctcactgcaacctctgccacctgggttcaagtgattctcttgccttggcttcctgagtagctgggattacaggtgtgtgccaccatgcctgactaattttgtatttttagtagagatggggtttcaccatgttgaccaggcttgtctcaaactcctgacctcaggtgatctgccttcctcagcctcccaaagtgctgggattacaggcatgagccacagtgcctggtgggtcttctatatataggattatttcatctgcaaacagggacagttaaacttctgcctttccaatttgggtgtattttatttttcatctttttgcctaattgctctgactgggacttttagtacaatattgaatagaagtagtgagagtaggcacccttgtcttgtttcagatcttagaaagaacttttcacttttgagtttgattttagctgtaagcttgtcatatatggcctttattgtgttgaggcacattcctactatacctaatttgttgagagcttttatcatgaaaggatgttgaattttgttccatgccttttctacttctattgagatgatcatatggttcttgtccttcattctgttaatgtggtatatcatattattgttttggttatgttgaaccatcctcgcacctcaaaatctcacttggtcatgatgaatcattcttttaatgtgttgttgaatttagttttctaatattttgtttagaatttgtatatctatattcatcagggatattggcctatagtttcttttcttgtaatgtcttgtctggctttggtatcagagtaatgctggcctcataaatatgtttaaatgtattcccatctcttcaattctttggaagagtttgagaaggattgttattagtacttctttaaaaggttggtagaattcagtagtgaagcaattagatcctgggattttatttgatgggagacattttattacttattcaatgtccttccttgtgattggtctcttcacattttcttttacctcatgattgagtcttagtatgatgtatgtgtctaggaatttattcatttcttctaggtcatccaattttttggcatataactgttcatagtagactcatgatcatttgtatttgagtgctatttgtgtaatacctcctttttcatttctgattttgttgtcttttttttttccctgatctacctaagggtttgttgatcttgttttacctttttaaaaaaccaacttggtttcattgaacttttcttttttgtctagtctctatttatttctgctctgatttttattattttcttcttcctgctatctttttgcctagtttgtttgttttctagttccttgagatgtaacgttaggctgtttatttgagatctttcttcttttttgatggaggcagttattgctaagaactttccttttagaagtgattttgctgcatccgataagtgtcaggatgttgtgtttctatttttgtgtatttcgagatatttttaaatttttcttttaatttcttctttgaccttttggttgtttaagagcatgtgtttaacttcttcacatgtgtgaattttctgaagttcctcctattattgatttttggtttcatattatagtggttggaaaagatgcctgatacaatttcagttttcttaaatttgttaagttgtgttttgtagcctaacatatgatctgtcctggagaatgttcygcttgtgcttgaagagaatatgtattctgctgctgttggatagaacgttttgtacatgtctgttaggtctgtttggtatgaagtgtagttcaagtccggtgtttccttattgactttctgtctggattatctgtccactattgaaagtgaaaatattgaaactctttgttattattctattatagtctatctctcccttcatttgtatcaatatttgctttatatatatatatatatctctggttttggttatatgtatatatatatatttaggtcctctggttttggttttatatgtatattatatatatttacagtagttatatgctcttgaagaattgactgctttatcgttatataatggccttctttgtctcattttacagtttttgacttttaatccattttatctgatataaatatagctacacatactctcttggtttctatttacatggaatatctttttccatgcttttattcttaatttatatgtgtccttataggtgaagtaagtctcttgtaggcagaatatagttgggtcttgtgtttttattcatttagccaatctgtcttttgattggagaagttggttcatttacattcaaggtaattattgataggtttggcctcattagtggcattaaaaattattttctggttgttttgtagattcattttttcctttctcttttatgactttcctttgtaagtggatcattttctctagtggtatttttgatttctcactctctatcttttgtatatctactgtagctttttgttttatgactactatgagacttatataaaacatattatagtcataataggctattttaaggctgataacaagttaactttgattgtattacaaaatcctacacttttgcctcacccatctctctcacattttatacttttgctgttacagtttacatctttttttttgtatatccctcagcaaattattgtagctattatttttaatagttttgtcttttaactttcatactaaaaatttaaaggatttctacaccatcattacattataaaagtatcctgaatttgaggatgtaattacttttatctgtgagtttcatactgtaatttttgttttagttttttgagatggagtcttgctctgttgcccaggctggagtgcagtggtgtgatcttggctcactgaaacctccacctcccaggttcaagcaattcttctgcctcagcctcctgagtagctgggaccacaggcatgtgccaccacgcctggctaattttttctatttttagtagagagggggtttcaccatgttggccaagctggtcttgaactcctgaacacaagcaatctgcccgcccgcctcagcctcccaaagtgttgggattacaggtgtgagccactgcgcccagcctctagtgtttttatgttactattttttgtctgttttttaagtttaaagtatttcctttaacatttcttttaagagggtctggtgatgttgaactcacttagcttttgcttatctaggaaagtgtttatctcttctttacttctgatggacagatttcctgggcattcttggttggcagtcccgtcctccccctgcacttatatcaccccactctttcctggcctgtaaggttcctgctgagaagtatactgctagccttatttgaactcccttaaatgtgattgcttctttcctctggctgttttcagaattctctctgtctttaatttttgacagtttgattatagtatgtcttgctgtagtcttacttggattgaatctgattgatgatatttattaccttcctatacctggatatttgtatctttccctagatttggaaagatttctgctattatttctttaaataagctttctggctctttgtctctttattctcccccaaatcctatagcatgaatatttgctsttctgatgctatctgataaatcccttaaggttttattccttttcattctttttcttttattctctctgactgtrttttttaagataacttgtctttgagttcatagattctttcttctgcttaatcagttctttttacttctctatgggttttaaatttcattccttgtattttttggctccctaatttcttttttaaatataattttaatctttgttaaagttcttgttttggtcttacagtgttttcctaatcttatggaattatttctctatattgtattgaagtttgctgagctttcctaaaacaattgttttgaattctttgtcaggcagtttgcatatctccatttctttagggtcacctactgggaaattattgtgttctcttggtagtggtatgtctccctggttttttatgtttcttgttgccttatgttaatctttgcacatttggtggaacagtcacctcttctagattttatgggctagctttgctgtggaaagtccttcttttattgggggcttccagggaacttgctgggtgggggatgtagcaattctagcaccagtgaaggtgcagctgtgtatgtctctgcagctctgtcagctgaggtcattgttgatggagattgcagtgatactcagcagctgataccacagtggcagtgagggtttctgggttttctgtgtccatagtggcagtggcagtgaggattgtccacagtggcagtgagggtttctgagttttctatgataatggcagctaagggcctcctgatttctttttctttcactgaggaagttgtggctgaggggatttcttttggcactggatttggcttgcaggcccactcgcagtttggtgtggcactagtgtctgatgagtggtgcccatggagcagccatggagctgaggcctgaagcacaggcacaaaaggaaggaatatggctctgggctctggggtgtaatggcactagtgtccagtgtgcaggcactctcactgccacactgataacagtatgtaaagctcagattcttgtaaagtagccggggagtcaaaaactagagcacaaatgtgtgtagttacagtggttttggagtcagagcagggcctagctcactgtggtggctgagctggtgcctggagtgcagccatgcacagcaagagcttaactctaggttctggagtacaaattagcttgctagtaagctccagtgtctgaaatgctccagtgtctgaaatgtggacaaacccagtgcagccacaggacccaggtctagagtgtgaggactcaagaggtgtccagagttgaggcacttaggggatttggagagttggtggcttctttcccaaagcagctcaacagtggccacttcttgggttggtgaggtgtgtgtagctgtgtcttcctctctggggttccctgtgaagaataatggtttgttatttcagtggcaaaagatattgttgtcatctgcagagcaggctgctgaggaccatggtggttttcaccacatggctgattcagacaacctctgctattcttctttgttctgggcaatatcctggcatctcaggtatactgatcttaccagttatttattttctgtgtgtatattttttttttgctccactgtattgttgcaaaatcttaaataggatcttrgggactctctggggttattttgtttggagatagctgtctatgtttattttgggggtgctaaagggagaaagctgatatctcctactctgccattgtggttacatccctattattcatttattcttttaaacaccaattcaacacttgctctaatggactgggcattgagtatatatggtacagcatagactcaggcccttccttaattaagtgagtttttaaaataagtttacaaacaggagtacgacattattggcactagcaaatctaatcatgtaacccctctgcccagagtttttccaagggcttctaattgactatgggatgaaatatcmctccctttgcatgcaatcaaaggctttcatgacctagacctttctctgtctatgttcaatttctctacttcccacccccatctttagcaattggtattttagaaaacgctaaactaattccccagaatgcattgtgctgttattgttgtttcgtgcccctacatatggggtgtcctcccttggaatatcctttttttccccataagatagacatggggtttctttctactagaattatatgccccttgtaaaacagctctcttatgattacttaccagtctctattgtctttataatttttttgagggtgggactgtatggttgcctcttgttttacccttggcctctagtatagttttaaacacatccattaagtcaatatctactgccttagggacaggagatacagtggcaaacagacagggctcctgctattaaggagttactaaacaaggaaacaaataaatgggatgatatttgataggagctatgcaggaaatagaaaggatctatttaaccctttgatattgttgatcccatgatagggaatgatggtggtaggtggagggagacgctcatttaaataggcatttcagggaaagcctactgaggaggtgatatctgagccaaggtcgaaagtatgagaatacaaccacacaaagagcttgggggagtgttcaaagcagaagagaaagcaagtatttgatatgttacggcaaccaagagaagaccagtgtggttgaagcacaaggggaagagtggtttgagatgtgtttggagaggtaggcaggagttggatcatgcaggtttttgtccaccttcaaatatttcttgaactgaatgtgtcaagcctgaaatcaaattctgcatattttgtccttatcctccagcatatccttaggcttcatttctctccagccatgttcccactgggcccactgcaataagagtaagagtgtcatacatttctctccagttttattagtgggattttaccagatctggaaatattaaaggaaggaaattgttttcagtgtttggtcttatgagtaggcctttaacaacagctatatcataatgaattcaggatgatgtgaatgatgattgcagaggaactggatatgcacagttcatacagacctctaagtaaagcttagagcttgtttcatttgcttctggtttttatctcagtatgatccagcaacctaaaataatgaaagaagagctccatttccagtgaccagttcagtccctgcactagcagaaagttagtgtagaatccaatgcaaagatcacatgtaaattctagaaattttactacatttttttttcagagatgacaattgaattgcctgctttccttccttccttctttctttgttccttccttccttctttcctgagcactgaaggatgtaagtgctggtttgaagaatctaaaaggcttcagggtaacagtgaagtggacgacacattcttcttccagctgctgctgttcacaacacttctgacagttaaaatacatcacacattctcttgtccttttaatgtaaacatttactgttttaagtggactatagaatcaaaccaaaatagaaggatgcagactgatatttcagaggtgaagctaagcactagactaaattaaataagagtaatttgcaatctaacacatagttataatacatattgtacattatactctgtttgtccctgggaaagattaaacagagggctttcattgcttgytgtatttttacagcctgttactagaaaagaatttcatatagaacaggcaaaattttgaattggaattaagttaaaaataaatggaaaaagtagtaaggtcagggtagcctccttggtgttgattttctcctatgcttaagcatcatctgaaagtcaagaaaatgatcgcatctctagtttttgttgtttgttaatttcctcaggaaaaacttgacctccttctttcttattacgttggcatctgtcttaagcctttgccttcaattcttatagcttctttcaaattgtattaaatttgaagactaagaaccttcaaaatgactcacatttgaatcctggacctactcctaagctgacctgttctagtttttaaaaatggatgtgaaattttgcttagaatcctagaagttaaaaatgtgacatcctacagaatgccacttcatacrggcaagtctggtgcccttaaagttagttttaccctgagaggaaaacttagaaatgaatacaagttcaagtttgctcaatttcttgttttgcttaaaatttgcctacataacacataaattcatcaaactcctttcctagtgacaatacttcattagattactttagtgagtattcrggagattttcatcttatgagtcataaaattcttttattccccaaagaatttcyggtgtctgattggaatttcacgtctttgtagttttagctggactctttgaagcagttacttcctaaatgactgtattcctgaggcctgcatgtaatacctggggagctgggtcacaggttgactcctgtttttcaagaaaattgaaaaatcaatctctttcattgctttagtcttagtaattttattcagaaattttcttaaactttttaacctcctcctgtcatgacagagaggttttcacttgctgcctatacagtttccagcattaatttttttgtgcctacttaggcccgtttctgtctatttctgtgaatacatcccagcgatttaatgttagtatgtttcttgcctttcctgtcaggttttcatcactcgtttggtataaaggaaaaggggatagaattacaaatatactggaccatgtagctatcgatgagaaatgtcttcagatatccttttacttttttcttcttcttctttttttaaagttctttttgaaggaggtgaaagtcaggttatagtggaaagccagaaccattgtgtgttcctatttgaaaaatcctgggaagtgaacatgatactttttgacatgcgagtttcagaaattcttagtgattattataatacacactccgcttatgtgcagagcttcatctgcatgcacaagtctttgtgtgttttaaaagataatgcctaactcttctgtttataaatggcagtagctgagtatgcacagaagagactgaagtctaagtctggatgtgctatttggctacattcaaacagcatgggacaaacacaaaatgtaaggctagtagaatattgacactaacaaattattcggaagttggttattaggaaatctttcactggacttcagtatctttggtttctttaagaacaaatctaaaattttaccccaaaagctaggtagttatatattatttgtattatggctccttcaacacataacttttttaaacttttaaatcaataaaagaagggattctgtctataaaacacaaaggaatacaccaagttaatgttttagttgattagtatattattttgagagtagaaaaaaatcaatgcaaaattacttgctattcacatatatgcagaaaatgtaagtccttggaatgtagcacacattatcattacataatctatatccatatgctgtttataacaagctgaaatgttatacccttgagaaaagaaccagattctggcacaggactgttttgtggcaaggaaagatgaatggattccaaaattttaaaaggggggaaaagcttgatggttccacaaaaaataagagttgaaatggggatttagagatatatatgttaacacaagctgacaattaaagcaattaatttccttctttatctatatcccctcctagctcttctaatcctgactaaggtaaatggattgactcacctttttagcagatgaagataggaacaaagatatctggcattacagcctgtctccccatcccccgccatccccatttgtagcttttttttttacagatgtttttttccatcagttagaatagttagttcttaaagcagttagagacagatctgtaccagtcagagaagcagtggttcaagcctgttggcttaattgctttgagtatgttgctaatgatgctggggccacatgttagatagccaatgtgagcrtttttatgcagtggaaaaggtctttctccagacaaatattgtacctctaatccttttatgagtaaatctgagataaagggatttgtgaatttgtcagtgactcattaaaaatatattctgagtcccttaggatagctattattaaaaaacaacaaaataataagtgttggagaggatgtagaaaaattggaatcttatactagtgggaatgtaaaatggtacacttaatgtgaaaacaatatgtcagttcctcaaaaaattaaacatagaattaccatataatccagcaattccacttgtagttatatatccaaaagaattgaaagcagagactcaaacaagtattttttctccagtgtttatagcagcattattcatagtagccaaaaggtatttttttccttgactcttttcattttagtttcttctgttacaaatttatctttctttaaaatttcttatggagtcatattctgttaaaattttctttagagtgtgaagtatttgtggtttgatttcttttctgttttctgggataaaacttccagaaaaaaacttcatcttttttctccaagttcctcttagaattaaaaaaaaatttttttaattgtccatggtattcagtgcaaccacaattttctaatgtcaaatttcagtagttcttctggtctcagtcttctgcagtacctcacaccatcatgcacagaatggtgtgagggagatactttacaccatggcccacagacctgggaattatcactctggcctttctgaatttcatcaccctcctgcttcactgtgatggtctttctccaaggttgttgtatgatattgatagctttcctagctttcaggactgagaaaatatttgtcttttcaaaaattcattttgtttcatttagtttctgcttagggaaatctttaagtctctacactgctcccttccccagggttgctatttgggtttatattttgcatgtctccaagattctctcttagcttcctatcctgcagcccaataagagacgacccattccacttgtatatctctggtgcctcactagatgtggcagttcaggttttctgaaccacctgatctgcagggagtacttgatctcttcctttattttcaaagatcttggcatattcttttgaaatcctcagtggtggagagtctttgcactttgaggtgcttacttttctaagtgtgaacaaattacccttgcagcagtcttttctggaatcttttggcttaagggctcctcatttagtgtatggggtccgtcctttctccattttttctttttttgaaaattagacaagtagaatcttactgtctgctttgtatccacacctaggagctagacctacacatctatgtctacatttcatttcaagttcttgactcaaccccctaatttcagtccagctcctttggaattggcattcctcctttgatccttctgccccaactctggtgtctgtctcctataggatttggctgagatctgcccgtctacctctgttctagaatatcctttagatcactttgtccacccagggtgcaggcagtttaatatctagttgagaagataagtctaacatggtaagacaacagacaataatatgaactatcaccaagtaagttttattgtataataggtgttgataggtgtcatagccattcagaaatagtgaagaatatttatggaaagcttcagtgaacagatgggacttgaaaaagatattaataagcgttgggacttggagttgtaaaaattccagtccagtgaaggaacatgaatgacggaagaaggtgggaaggagcttggcatatggatgcaacaatgaagatttcctcaaaatactctattttccttccattaatgagatagtaaataggaggctcttaaagattgtttccatctggaggttactatcatgtaaattccttacatttgtgtggtgattagctattttaaatgcactgatataattatatcatttggtctttgtaacagctttgtaaaatcacagatgagtaaatcacatcctaagtatcttgccagaaatttcattgctcatgcatagtagagccgggatcgatttaggcagtgagaatcttgtgtctgggagaccagttagatgttatctacacagaaaatggtgaggctccaagttttgatggtggctgtggaatggagaggaagggatggaaattagaggtagactccacggcacttaatgactaagtggatataggagtaccacatatgtgctttgaatattggtaactgaaagagttgtgatgccataattaagagacaggaacatatatgtaagtcaagtccctgatttgtaatttgaagcccatttcttttgttgtataagaggtggtaaagatctctttctgactcattgcaccttgtttaaaattttttgttgcttttccatcttttggccaagatcaaatctatattttaaaatgtttttcatatgtttcaagactgttttgagtttactctttagtattttctctgccaggctacgtaatcctagttgctagtttatttagccatttctatagggatgtttttaatgctttattatatttgtgattgttttctgaatctttgccagcttctccacgtgtctctctgatgttaaattcagatttggtcataatattttgtcagagctatagtctgagcaatattgattttgaacaaagagtagtacatcaagtttcttaaaatttgtacacctgtttgttcacagcagtataatgttacactacactgatgacccagattcaggttatattttctataaagcactttgaaagattttgataacattttgtggagatttctaggaaagatttgatagacttggaggcaacatttcttctactctgaaaggtaaaggtcttgacattcatttctcataagaaaggaatttatcaaagtagcaataaaagataaggctagagttagtaacccaaggtctgtgaaccctgaagcttggtatatgtatttggattaatttttttctagggagagtccagatattttgtccattttttcaataatagatgtggcatacaattaaactgtatcttccatgctttttccatttaatacatcctacttagaaaagttagatagtgaaaaatgattatattctaggaaaagtcatggtagtacascccaggtaggaatgagaagtttcaatatagtgtccctggaatattcaggcataggctttagataaggagttcttaamctggggtccttgaattaaacttagaagatccatgaatttcgatgggaaaaaaatccgtattttattttcactaatcacaatttccttgaattatgatatatgttacagataacccacagaagtacctataagtttgtcaccaatagaaaccacaaatgttttcatatcataatacagtcatcacagatatctcaaaataacatttacactaattactacttccaaattatgataattagtagatccaccattaaagcttgttatgtaatgtgttaataaagaagcacatwtttactatataacgcatttgttttttttcagtattttgatagcagtatttaaagatcatttttccattgtaatcccatatatttgttctcatgcatttagaaacattttcctgtaggctttgccagacttccaaagggtctggaacaacaataaaaattcaagaaaccctgatttgggtgttatagcatcatttcatcatttctagagttttttaattcactgaacattaagcaattcaggatttcattacataatgttgtttattgagaagaaaatttacaaaaatcattaatcatctggtagaatgtgaacttttctagctttcagaaatgtttctagcttcttactattttatttctgttcatcactagttatattctgtaatagactgtctcaacttgtcaactctctgagctgccacagagattgtttggtgtaggatttagaagaaagaattttggagacaatcttggatttacatgccaacttcacttaacggtgcacagtaaagtggccttgtgaaaggtacataataatctctaaaccccagtttctttacctgtaaaatgggaataaataggatgtgtacacaatatatacgacaataaatgtaaagcacttagcataacatcacaaataataacaataatactcattggagatggtcctgtgtgtggccttatactttctattccagtttttctgaacctcttgagctaaatagtgacagtaattttggtatggacaacttgagtaaagtttttgccccgtggactaaggggccagagagcagtgtcaaaaagcatgatggcaggattttgaatgtgacagatcatggaaggagtttgacttaaggagatttatggacttcaagagtagagatcggcatagccacttctaagtgtactcagccttcttgctcccggagactaagaagcggytaaacatctgagctgcatcactgttcgtgacaggaattttggatacaggaggctttttcttattctttatcctcttattctctcagcaagatctggtagttcatctgtgtctggattttcactacctgtaggactaccagcttttggattatattaataaccaggcctgaacccaagtgagacaaaaaagaaaaataacaacatatctaagtgagtcctgcagtgagacaggatcagtctgaacaaatagacacatatctgataaaacagagtgcctacagtagacagacgacaactaaaccaagaaaaaaaaaagccagctgtcatgacactgtttgcctaatccagttatactcatcccttttgccagggcagaagtgaatattccccaggtgaatgaataataattgatctaagccaatcataaaattccatttcccttgtcagtggttgatttcagttggacagatgctccattcctgatcagttggatctgagagatttttgctagaagttttgctaactaacaaaatgagacacactggctgaagtgctccctttttcactagatgttgttttgtctgcctgtggtgtctggaattactgtagccgttgtgtgaccatgagggggatatcactgacattgtgaggagggcagacattgtccctgatgagataattatgccactgacttgaccaacatggaaccacttaaatatagattccttgttatgtgaaacaataattcctttattgtgtaaggcacttttatttgtgttatttatttcttgcagctgaaaaattctttctgatacaattaagggaattcatgtctagtccccaaaaagtgttttggagatttgaaaagatcatgatttcccacctaaacaattcagtaggtgagttgaaggaagccactgctgagaccaaaatttgttgcctagaagatcaaatggaagaatatctcaaagcacagagcaaaaacacaaagaggtataaatcttgaaagaaaaattaagagacttggaagatagatccaggaggcttaacatgcaaataatcaaaacttttttgggggacctatagaggaactcaagtctacagactgaataggctcactaaattctacataggattaatgaggaaggtaaagcctagcaagatgatactcccgaactttaaggataaacacaaaatcttataaccttccaaatttacaatagaagtgttaggttagcattcagtttctcatctgcaatcctggaaaatagaaagacaacaggataacatctacagataacatctacaggagaggaaggcagagtggaggaaaatgagagttttccaaaggctttattttacttgggtgggaggaaagggaagcagaaaagggaggatatagcatcttgatatggaagacaatgggtctttatggaggaaatggtatctgattttccaataacagcagataattctttgtttgtgagcacacacacacacaaaggaaaatcctgtaataatgggcaagaatggaatgaataggaatttcatctgaatagcagaaaaagggggacaagcacaacataaaatggacaaatataaggaaaaatgaaaggaaaataggtatgtctcttgttaagtcaaatatgaatgaactgaattctcccattacaagacagattgtcagagattgagttaagttctagttatttgctacttacaagaagcaaacaaagtataaagaaagctttatggttaaaacatactaggccaaggcaaacaaaacagaaagcagaaatggcaatattaatatcagacggagtgaaaattaagctaaaaagtacagaggataaaggggaattatatgataataaaaaggtactattcatgaagagtacaaagcaatcataaacctacaggaataaattaacataaataataaatatatgaataagaatcttagaaatgaaagaaaacttgatttaaaaatacatagttacggtggataactttgatctctctctcagattgagacatatgtgtagtcaaactaaataaggatagaggataacccaatagtacaatcaactttttttaatagatgaagtatctttcaaataaaaaacatctttcaaataagaaatataattttgtattctcatggaacattagaagatgatatatcatgtatgtggctacaaggaaaatcttaaattttagaaagtagagatttcgtatagcccatatttttataataatccaatgaaactagagataaatatctaactctatggggtacaataaacattaaacttaaaggaaatgttgtaatcttgaataccttcattattatagaaaaaagatgaaaaataaaggaactttataaaaagaacaataaaaatgctaggaagatgggaataaagataaaagctaaaactaatgaaacagaaaacatcaaacgagtagaaagaataagtgaatccaaagatggttttttgaaagatcaaaaaaatagattaactcataataaacctggttaaagaaaaaaacctagagcagaaatatttatgatatttacaaaaaagaaatacagtggtagatacttgcctttcctgatataagaccagtctgtgaagccaccataataaacttacattggcatagggatagacaaatagattagtagagcagactcgtagacaacagtgtaaacgacagtttataaacatggtatttcaactcaatcaaaaatgaacagtttaaaacttattggtagcccsattggtattctgtttagaagaaaataaaattataatactatagcatatacttagtgaaattcctgattaagatctgaatgcaaaacaaacatcctatatgaaaatataggatactgtatgtataattcagggggaggaactctttttaactaagtctggtagcccagaaaccgcaaaaaaaaggacaggcatatttgaataaaataatcaaaagcaaagtcaaatacagtaacaatagatatagaagaataattataatgcagatgttagtaattaatatctgtaatttacaaagaactgttatcaattaagaagaaaactgttatcaattaagaaaattaagaagaaaacaatttcttcttaattgtgtgaaacagccattacaaataacaatgcataagaatttaataataccttcctgagacttttgtaattttttaaacactaaaaggaagccaaatatcaaaagactatataatgctataatagtgctacagtgctttatgtttgtggatgctgactaaggcttccaaacttttgtgccacccaacagagatttcataggtgcccacagtatactaccaagaaatagtaacctatggattactctggtctagtgacataagtagtaataaatacttgagaggtgatgtttattacaaatatctgaaatatatacattgattgattgtaataacattttcacaatttttgttaatattttcttcagccccaggttggctcacttatttaacaagttatctatttagtgcctactcagtactaaggggctatatcttttgcctgttaatcatttaccatttagtggagtaagacttaaatattactgcccaactgacaaaataatatgtcaaagtgtaggtcatggattatattatgggtatgcttggacctttattgaatttcatttttttttggtaacagaggtccggtggacacattaaatatgactacagtaccatagtgtctttgccaaatttatccgtctgagattcaacactcttcatgtgatgacatctaattttaatgcattttaagcttgtcagtggtcagttttaaagccattgaaaccatcaaattgcaagggctccttgtacctacaggtcttgatgcaggaccccggctctatgaacttagttgtagttctctgaggtgctcctagagctgtcaatatgaggagtggtaagtaggttaccttcaatgaggtttcctggaatgtaggcagttgtttgggatttagagaagactgtcatcaggtgctaaactcttcaacaaatattaataagttacctggagactctgtaactaattcggctacaaagacttgtatctgtgtattttaaaaccaaagctactattgtctttaaattccagatttccagagtaacaggaacgtatatagaaaattcattcaaccaaaatgtatttgaggagtttggaatacactgggaacaaaacaattatctttcccttcctggagcttacattctagctgggaaaataaagacaggagacaaaaagcataataaacagttatgatatattagaaagtgatacatatgtgacaaaatagagcattgggggttggcaaagatttccctaaaggattttaaaaagaaggggtggtaatagrgtatgctttggttcgatgaaggttccttcatgccttttcgatgtaatctattaaacaaatttaatatattagggaatgtacagtatttgctaaattgcttcaattttgccatgtatctgcctgccacaaaggcaaaacaccatttgtcatataaacaattctaagtaattattttgtcctaaaatatttgttcttaatagcttttctgagcaatctgttctgtttctaaagatagttgaaaactgtattttcaagaatggttttcagaatttaaattttagtaggtggactaagttttgacrtatcataaaaaggtgttgtagatcagtgaatgatcatagaagatttatgaaaacagggaaattcaggtttagcacttaaaatatatataatagaataaagatctaaagcctattcagaagttggagaggtttcagttagagaaaaatgtcaggagaaaatttagataagggaaagaatgttgagacttaactgcccctcagaagtaatcttacattttcatcaggtacatatatttatgagaggaattactctgacatttttgataagtacccaaccaaaaaatgtaagtaatagtttgtcttagagtcccaaataatgctttgtagtgaatagccctaattgagaactgcagttgaatggatcattatttcatttttagtctgaattgcatgttgctgggagtagaatctgtatttctttgaatttccccatcctatatctcacttggtatttttaaggtcagttaagcacagtaaataatctttgctcagcaagcaacccacatcaccatcttcctgtctgatgtagctaataaattctaagcaaacttcaaactccttgtgaagcttcctaatggatgcctcactggactgaagagcttttggaagcaaaataaaataatcatctaaagttgaatgtttttggatcaaggttactaggtcaacactaaatttgaaaccattttgagagacattttttaatggcacttagaaattatggctaaagatcaggctgttacatgtgatgtagctcaggtcctttgatgctaaaggtctacaactgacttctgtgtaagatgtatttttaaaaacattaactgtgatttaaagtagcaagagacagtgttcaggccagggaaaataaaatctccctctccaggtttttggttgaaatggtttgagttcagtaattttattgaacctgaaaaaatattattaatagctgccttcacaaagggaaatagggaagctggcccctgtcaattcctgcttaggagttgccgagacattttgagattgcaagaaaactgtggatgaaatccataccaattagagatcctgtgtgtttggaaccatttaaaaatgttgtgcagggctcaaaggaattagtaaagcttgctgcagtacagctacattattaatctccaaagagaatagataccagatgttcacagtgcccaaggacacctcagtgttcttgacagccttagtcatattgtcctcaaacagattcaaatgcctgaaatgattatgggtgataaggctacaccgtttgtacatctgaacttgttaataattttttgaagaaatgcactatttttgataggcaggaaaagtaaacatgataaatttgatatttgtaaaaaaaatgtctaaagcaaaacagtagaaattctttgcctatttttaaaaatgtttttccacttgacccagtgatagccatattcaggctaagtgattatctttttgtgtgtgcgtgcttaaacaaaataaatttacttcactgagttctggaggctgggaagtccaagatcaaggagctcactgattcagttcccggggagggttctctatcctggcttataggcagtcatcatcattttttttttctgattttttattgtggtgaaatacacataagaaaattagcatgttaactgtttttcagtgtacagttcagtggtatgaaatacattcacattgttgtgcaaccatcaccaccatccaacttcagaactcttttcatcctgtaaaaaggaaactctggacccctaaataataatgctcctttccatcttcccaccatcccctggcaactatcattctactttctgtctctgtaattttgactgctctaagtggaagttattaccttttaattcagtcatatattgtaaatataatgtaaataatgaaatatgtgatattttctttataattcatttaagaaatatttccatgagcttggtgttgaagttgtagtagttaataaagtaatcatggtctcatagtacttagtgaaagaagcaaacattaatcaaaaattacccatataaataaataattgcaaaccatgatacatggcttggaaagaaagtactactgggtgctgcaaacatgtttgacctgggaacctgacctagaattaaagctccagccatattgattgagcacctactttgtgtcaaaaagcaaaacagattacaatggtcatttaaggcattacagccattgactctcagtttggtggaccacaagataattaggaacaacaacaaacaaattaaaaataaaataaaaatcaaaaagattcttgtagtctttcttcaaatatggcttctgttcagtatcctttggagcatttgagtaatgcttaagttttttttaacatgtctaaatatttttatatcactaattttattgcaaaaattccattaggaaagtaatattgtaacatttgaacacttcagaaaacagagaaagatgggatgagtgatagggaccttgattccaaatatcttaaaataaacctcattgtgttcttcctgtagccttccttccctgcaggttgtaaaagagtagtctctgttcactgtcttcttcactatgctttccaatctaatactcattgttgaaatctgcagtgtctctcargtcttacttaacttgtcctttctstagattatgtgactgctgtctgtcctccatccttaagcaattttctcctttttcagactctgtcctgattcccttgtcctcttcctatttctggaaatgctcttttcttttcctctactgactcttattcttttgcttaacatttaaatacctgcctggttctcctctccgtttatattcatccctcctacatatccttatccaggaccttactgtcttttatgttgygatgactttccaatctgcatcttgagcttggctctcatttctgagcccacatattcctttgtctcctagatccacaagaaactgattttgttattttctctgtaaaaatgtatctctagcatgattcagctagtcacacaagctggaaacctagtaataatgtgatcctgcccttcttcactgccctgcatgtacygcaatcaccaaaatcagtaaactttgctctcttgattgctctataaactctcccctgcttcccagtcccattaaagcttcattatttctgttccagtacagtctctcatctgatatatacgtttccatgttccctcttatcccgaatccctccagtctgctttcagaaccatttttctaaaatacaaatttgatcatgttactaggctgcttaaaagccttcaggtggcccccaatcatcattttatctagaatgcccctggcagcagtgccaccaccatttacaactactgggttcctggacagctagatgagaaagcaggataactggtaaccaaaataaagttaatttttgaatagtatattgtatttaaattttatttgcatttttatctgcatgaatttttagagtctataggtttatgctaatttcatgtatattgtaaattccctacttttcaagacacatatatataattttttttttttttgagacagagtctcactctgtcgcccaggctggaatgcagtgacacaatcttggctcactgcaactgccacctccaaggttcaagcgattctcccacctcagcctccagggtagctgggactagaggcatgcaccaccatgcccggctaatttctgtatttttagtaaagatgggtttcaccatgttgcccaggctggtctcgaactcctgaccttaggtgatccacctgcctcagcctcccaaagtgctgggattagaggtgtgagccaccatgcccagccaagataaatattttaaatatcatttttatttcaggtacctcttaataaagctgaatgaagcatgggagaatgtttgccaaaactaatgattttctttttgtcatgtttactctttgtctggactgaactagtttgcttcttgagactattgttggtttgaagtaatgaaatcatgtcatcagcatatgggggacacatccttatatttgcaatggcaggagggaagaaatacaraaattctcaaacaatacaaagcaaatataaacttgaaaagtggtctaagaaattcctttccacttaagtaggcaatgaagagaccattctgacctaccaattctaactcagatgccattgcagatgtcataaaagtttgtgttaatctcatacagctaacccataatccgtttttagccacagagttaaatctgagccagttaaagcggctaaaacttacactgattttgatatttttaatcaagatttttaaaatgtaattgtagttagtagaaaaattatgatgcgtcaaatttgttgcttcttcaaatgaaatattagatgaagagactaaagtctgcagtttattaaaaaaaaaatcttgccttcttattcaagatgataaactgagcatacatgtttgtttcccctctctcccaagagatatctttaaaatgagagtaagaaaaagaagaggaggagtaggaggagtaaaagtagaagaaatccattgcaaagagaattggagtggggtagggagcctttagaaaaggaagctcaaagttttcccaagaaaaaaawaatgggtggaaatgcattaatgggtgtgaccaattaaagaaagttgcagcccaaaatatgtacaagagttgttgccgatgcccagcagaattacaaaaaggctcagaactcagaattgacaagagcaaaatggggacctgacaacgaggtgcttaactgaaagtctaaataacaactagactagttttacattttccttatcttcatatttagaatgacagatcattagttacccacaagaaaacaagcctggaagactgctctcttaagatattaaacagcttgtctgggataattggggttgctattgaggtgttgatattccagagtaaaccattccccattgaggtattcagggaacgccaggatgaagccttgtccatcagcaagtgatgacagcagtcctggagttcccaggcagcttttatattcagaggaaaggcttgctaaggatacaaacccatactacatctaatggcagagaaaacctccatcagatgtgtaggataactgaccttggcctccatgtttaaataggaactgttgatcaaagatccccaaagacagatgaaggaaactaagagcttgaaatttaaaaatcaagataargagaacaatttcccagaaggagcagagatattttagggaatcrtagaaaaactaaaataaaacaactctctagttaatattctcagaaatayttgaaaagatactttgtttataaaataagatgatactgttaccaagaaagccagaggtaagaataatgtgaaaaaataagttgccaaaaaaatacctacaatgcaatgtcatttatataaaattctgaacatttaaaatggtatattttgtttctggatatagacatgtgtagaagattaatcaaaataactgtcggaatggtaggtgagtaattgtctttggagtactaggaggcataagagtagggaacaaggttagaggcagatctgctgtaatcgttagagaaagatggggagaaagaaacctgaagccaatatagaaaacaaggtagtatctgtgaaacctgggcagtgaacatctgttaaattgtggatacctagtccattatttgtatacttttgcatatgcttgaaatgtttgtcattaaaaactcaaaaagtaaaattttgaatacagaagtttgtacagttgtgtaataaagtcataatccaaacaaaaataaaaagaagtgtggcatgccttttaacaagtgttgctgtataaaaaatggaaaatcaatttgattttcggtctcctaggattacttgttgcagtaaggatttggcagaataacacaaataatgtttattagttttcagctcttagaatctatagaaaagcacagaagacttaattatggttggtcactggagtggggcaaaggataggtggagggaagatgagggtgctaaggctgtcttacagagtggggagctgaatggtattatcttaagctactaaatatctacttaagctagatattcatgcattcgatttttcatttatgagatagtttttttggaacaccttttatgtagcaggcacttttttagtttgttgccagtacaatggtaaatgaaacaaactccctgcttttatttttacttacattctagttcaagaggcagacattacccaattaggttttaaagaaattaaaaataacctgagtattaaaagattggaaaggggaatggaggggagattatgtaggtatragtactaaatcttaatctttcataagaagaaatgaatttataatgtctaaaacagcactgtgcaaggatggaaatgttctatgtctgtggaaatcttggtggaaatgttccatatgtatatctgtgctgtctaatatggtcgccattagctacttgtaactgctgagaacttgaaatgtggctagtgtgactgagaaactgtaattttatttaattttaattaattcaaatttaaacaataacatgactgataactactgtattggacagcacaggtttaaaatgaaataatcaagagacagcagcataagcacatttttaaagaaacagaaaatctatttatcatggtttcctgtgggtatggaagaattgacagggaatgtctcattatgagccatcttgtttgattttctaccacatgcccatatttggttgattgccacttaaatttttggaagactatattgcaaccaaatgggtctttgaaggggattaaagaatcattttttaaatgagatagactttatacctgaagcatcagttaagtgaatattttattttattttttgagacggagtcttgctctgttgcccaggctggagtgcagtggtgcgatctcggctcactgcaagctccacttcctgggttcatgccattctcctgcctcagcctcccgagtagctgggactacaggcagcccccaccacgcctggctaatttttttgtattttttttttttttgtagaggcggggtttcattgtattagccaggatggtcttgacctcctgacctcatgatccacccccccagagtgaatattaaataatttggcaagagtcaggactctaagtttcaaacaattcttgttagcagggggactacatagagagttggattatttattttgaattaggtaataaggtaaattgtggtcagtgaggttagcagattccagctacaaataatctgaatactacaaattttgaaatatggccttggaattagagagctgtgaggactgatacacacacaaataaagacctgtacctccagcttgtctcaccaaaactgtgctaaaatatgtatcatcattattgacccatcacccaaacccagtgggattcattgcgttcaaacttactttacatttgaaaataacaaaacatgtgtaattacctttcaattcaataagttctcattcatgagtagtttctgctgggttctgttgatgagtcatgtagctgactagcaaggtttctaatttttattttagggtggggaaggattaggggaagtggaagctgtatagcaattcttgttaaattaagaataggacaatgagggccacattttctagatatggtacagatagaattggcttcaacttgtttacactctgttgctaactttaacaacatgtttcacagatttttttaaagaaggtggaattgattgggatggagagctaagaaagttttacttatgaggcagttggcatgaaacatttagaatttgtcaacagaatactacttgtggagagctatgccattattcaattatgggctcaagtagacttgaaacagatttattaagctacattatgggttggagggggaatgattatttatgctgcaatctaaaaaaaaaatccattctagtgtagatgatatagcaagcaccaaagacgctacaacaactaatctggatcactttctcttatatttgagatgaaaatgagcatattctggagttgcttcacatgacatgagtagtatgacgttatatctgcagatgaatgtggcctgatgggtgaataaaattgaggcagaacagccatatttcaacttgcctgcttcagttgtactacatatatttatttgctatctggagatggtaattctttgaagggtgaaactatttattgaaaataaggcatccttgataataataggctaatatctaaaaagtacagtttatattctttgaaatgaaatgataataggcctaatccaatctcatcaaatagaaactaagggatgtattgggggtggggtgaactgagtctgtttatacaggttttcacatgacttttcttttaaaaagtgcatggaatgcatccaaaacaaataatgttttgttagaagaccaaaaggaaaatcctagagaaaggaggatggatgatctttctttaatgtcaaaactgacataaacacactccccttcccccacccttttactcaagataattttctcaacaagacgcagattgctttagtctctgcctattaccctttgaagcactttccttattattaggagttggggcaaggtttcctttgaggatttttacagcagtgaagagttccttctttaaatactttcacatgatgagggaattccgctttcaaagtgctgtcatcactgtggcttctctgccataaggcagtttattactgggggaaggtccttcttagtttgattgtcattaagtacttacctttctgatgtactctttgtatagaatgtcactttttctgagaagtctagcaaagcaactcagcattctcctttgttaaccttattggccaaagttagccatgattctcttttgaaatgcgttccaccacagtgagttacagtctccagcgtggtttttcgtgtccatctccactaatcaggatttgggttgacatattgaatattccattttgaaaactgccatctcttctacagggcaaagagacattgtgagttttggggagttttgaaatatctttatttatttttatttttatttttgactgtctcttctaatgtttaaataatgccatggtaaacaacaaactattcaagcatcaacagtttcccagaaacactgaaatcttttgagacctgcactctgtttcaacctccctcatcctgctctattcttcaatatagttttctggaaaatcctgtgcatatctaattcaggtagaaaaaaattgaggaagaaagtggaacataagaagagagtcctaaagtcagaatattcatatcctagttttggctttgctacttactgcctgtgtaaccttggcaagtaacttatccttctgttccctcccacccccaaaaccctgtaaaatgagtgaactctatgaacttcatgtttctcctctcctaaatacacaagaagtaaacctctcccccacataaagaggcgtaatcacagtgattgagccacgttggacagtgcagtgagaaactagcattgatatttcctaaattagtctgtaaggagtatgattttattctctctctttcttgtggaactctctgatgtgctgtaattgtttatctcatttgcttatttaaggctaactggaaatcagtttaagaaacatttgagttgtgcctttgtactggacactgtgttaggcaatgagaatactcaggtcaatgaatttagactctgccttcaaggtgttcactaactagtaagggaggaaagcatgaaaataaattacaaatccagggtgatgcctagaacaagataaataaatataagatgcaatgtagcataaaggaaaaatatatacatgtgtatatctatttctccatacctattttgaactctagaaataggactatgtggtgctggggtaaggtagctttatggtaaatttaatacaacaatgaaactcctaaacctgtttactactaaatcaagtgtgtccctcccacaatatcagttgccttaaattgcaattaaatgagttatgcccttgaaggttaaaaaggaaaatacagaatattttctttcttttcatagataaatgactttatttttcaatgtcctcaaatatcaccattaaacctgttttcactagcaattggcacttctattattaacaaagaagaacccctaaatgtgtcaagtaaccattgtaaaccaaatattatagcctagaatatattcaaattctcttcagaatttagaaaatgggaagaaattcattttcttaagaatgctagtatgtctcagcataattaatttttgtgaaaggttatagtctggaagtttaaggttttcctggtgctttgtagcaattttgagctcaaatcaaggaattagaaggtgttaacactcttggtgttaaatctagcactgactatcaatactatactcttgcatcgtggaggatgagggagctttggggatttggcctaatctgttttgtttgaaactaaaaatcatgttgttgaagtttgcattctgttttctttcaataggtgtattaacacaaagcaccaggttcttaacgggcttcttcctttctgcagaagtaaatgtgacttgtgaaaaagaaaaaaaaattgcaccagcacttcagcaacatcgcccctctttcatcattttggggattcaggcttcagctcagtaactccagacatattttggggaaacataaaaacatgcccataagtactgaacataaaacctgactgtacactcaaaacatttgtacaatcctatgatccatttaccatcaagtttcttaaagtgtgcatatatttttaaaatcactagaataaataaaactttgaactagatgctctttgagataaggtgctgcccagagatgtctgaggactgatgctctatgagtctcttatgaagtgaacaagcttcttgcccataaaaatagatagatgctatgatttccagataaccctttttccaggaaattagatgaggatggtgacaacaggatagtcgttttgttaaacaaaattttaactatccaaactaggtactgaaaaagcttgctttctaaggaggcatggaatagttgaaaagttaacagccagaccaattgattgtgttttggaaaacatcgtaatggaagattcatagtgcttcagggccatgctgagtgactctgaagacaagagaaagagtggtgagagagagccttctaagttcaaggatactctagaaaactattggatggtctaagaatgtctcatgaagcaccaaaccctaatgcaactgtaatctgaatatgaggaaagggttaaaaaataactgtactcttgcaaaatatattttccttcagcttttgacctttcttttttcaggttgaaaagttaaacatacactaaggattttcattatttgcttagtatttctttaaaatgcattctaacccaaggctgtgtatctctcctctctgctttgattcttgtgcctgctgtgycccaggttggccttcattccacgatrtgatcaattctgaggcaatcacattcacagatgacttttcctaygggatgcacagggtggaaacaagctgctctcaggtgagttcatcctttctgaaaacccaatacattgctttcaggactcctggttgtgctaaatatagcaactaaggccaagcgactggtcacaagaaggacagacaagcatgacgaagtttatatgaagtccgatggatgcctatgttcaggtgtttagcaagtctagtggaatgttaaggtcggcatgatagctcaagcctgtaatcccatactttgagagggccaagtggggaggatcacttgaggccagaagttcaagacgagtccgggcaacctagtgagacctcgtctctacagaaaatattttaaaacttagcagggcatggtagcatatgcctgtagttctagctactcagggggctgaagcaggagaatcactggagcccaggaggtcgaggctgcagtgagctgtgatcatgccactgtagtctagcctgggagacagagcaagaccctgtctcwtaaatwaaataaataaataaataaataaataaataaataaataaaatgtcagttattggcttcaccactattaaacaaaatcattggtaggaaaaatatcatcttcaattggctcagtaaattgaagagtgggctgttcttggggcatatgaagatttcattatgtggctttgaataacctgatattttgataatctccctctccttgcagttctgtgtacccactgttcagtcagaatgcctctactggcagtgatccaaacacaatcaaggaagacctcagaaatggcttttcttaggtgggtgtgaggaaggtggttgaagagaggctgtaggaagtgaaagttcagtggtaggttggctacatgagataaggtaattccttttctgcttctcctgatatacagacatcctcatttccaataatttcctaattagttctgtccatctgctttaaccaaattaatgctggctctaaggaagcaaatgagcatgtgttgaggaggaggcaaaaatagttaatctgacacccacaatcgagagacttgaacttgtgggtattttgtgcttaaacacagagacatagaatctccatctacatggaataagagcagctgcatattctatggaaggcaatcttgttctttcaacctgctttaaataagtgaaatgtaaagtctgcaatattgtggcattgaaagttattgacaccacagggtattttgttggggaatctgttggacatatcagaggtacaggagcatgatcaggcagctgtaatagcaaagtgattgccatatgggcctccctcagcattctttacctgccctttatccatttttctttaaccccctccaccaggcacaaaatgtttagggagtaggtggcatatttactaccaagtagggagggaggttagtttgaacctaaccttctgatgaatttttgtttttattaaaaaaaaaaaaaaaaagactggcaagtctcctgtccttcaagtgtgaggactactctctctcttgaaaattagacttcatattttatctgaatcacattttcagctcactcttgtttctcagagtggagtctctgatggtgatagtggaactttctggtgctgggtttcacccacagagggtctaatgtaattggacaggtttagtgtggggagcagcatttttaaaagctcctctggttagtgctcaccataaccttctgaggtaggtccttttttctctctgttattttacagttgaggaaactgaggcacaaagagagcaattaaacttgggtcagcttatgtggatttaagtggcagagctgagacttgaattggggtactctccagagctctttatggtgcccagatagatagacaggttgaaaagagtcattaaaatttaaaaatctcatgattttccagcagttggcttaatgcgatatagtttggggttttttttgtttttgaaatgggatcttactctgttgccaaggctggagtgtggtggcatgatcttggctcacggcaacctccacccgccgagctcaagcaatcctctcacctcaacctcccaagtagctgggaccataggtacacaccaccacatccagataattttttgtatttttggtagagatagggtttcaccatgttgccccactggtcttgaactcccgagctcaagtgatccacctgcctcagcctcctaaagtgctgggattacaggcatgagccaccgtgcccagcctgcaatttagttttaaattcaattaaatttgattgatgattttataactgtcacaaaaaggtaaactataagtaggatggcttacattaatttgtaacttaggtacacagtatttagtaaacctcttttaagactaatcgttgtttcttttattttctttttcaagctacaaatgctgttacgtgatcgttttaactcgttttcactcagaacccattttcaaacattgaatcttatgaaaactaaatttaaaaggcacagaaaaatgaagcataagatattaactttacttatggccctactttctaacctctttgtgacaaattcttataattcactgttggaataagcttctttctttctctgtgccagtcacatagataacatcagtagtagtctaggaaagatcattatgaagatgtcctacagtgaccaaagagaaatgaaacccacaaacaatgccaaaattaggcaacattcctaaaagaagtcaggctaaaccaagcatagctgttggcccctcagttaaagcccaaggtgactgttcctgttctttcctaacagttgtgtgatgaaccaacactgacctgctcccttttggcttctttttccacagccttcacttttcatatttagaaagtgtttgactctttcttaaatagaactcttaaatttaaagaaaagagggagaggaatttgttccgctaaggcatgtatgaaaatacacgctttggagtaaagtaagttctatgcaggagagaatgaggttccagcactaacgaatggtatgtgtgccacacccttgcccttgtggatggaggagggggtgtctgccacctaagcacaaaaacagcgtactgaattcaagtggactgggtatctttcatttcaatttctctgtcttttatttgtgtgttccattcacgtttattttccttttgttttataattttctttctttttttaaaattttcctttttctcaggcatctttttttaccttgacttgataaaataaaagatttagtagttcccatgctagagcagtcacttgtattttacttcctagtttctcatttttagcactattttttcattatctgtttatcttcttttaccttacagtttttcagttcatgtagtctcttcttctgctcagaacttctcccgtttattttattttattttattattttttattatgctttaagttctgggaaacatgtgcagaacgtgcaggtttgttacataggtatacacgtgccatggtggtttgctgcacccatcaacccatcatctgcattaggtatttctcctaatgctatccctcccctagcccccaatcacctgacaggycctggtgtgtgatgttcccctccctgtgtccatgtgttctcattgttccactcccacttatgagtgagaacatgtggtgtttggttttctgttcctgtgttagtttgctgagaatgatggtttccagcttcatccatgtccctgcaaaggacatgaactcatccttttttatggctgcatagtattccatggtgtaattgacaaatggaatctaattaaactaaagagcttttgcacaacaaaagaaactatcatcagactaaacaggcaacctacagaatgagagaaaatttttgcaatctatccatctgacaaatggctaatatccagaatctacaaagaaattaaacaaatttacaagaaaaaaaaaaacaaacccatcaaaaagtgggtgaaggatatgaacagacacttctcaaaagaagacatttatgcagccagcttctcccattttttaagagttttattttattattattattattattttgctggtgagataatgtgggaaactattctggtttgctctctttctaaaattcttgttgtattcttaatttacgtggcttgtcttttctctggactgagttgcctcaatatggtttgtgttataaaaaatctattagatgcttttagtgtgttgtagacattttcagtcggatgtgttatgtggtgtatttctttccttttggtaaagatggaatatctaaatacgaagaacctttaactgccaacttctacaaatgaactgagccttcatggacaaaacctgaatcaactcaacctgatcagcagtttggcaatatggcaatatttcattgttcttttggttcctacctaattctcacttcagtgcttaggatccttttttaaaaaaaattgtggtagggatgacaccatgcatacagtgaattaggcctcatatttgcataggaattgtagactcattgggagccaatagcctaccaccgctttacagtacattgtaaagaggtttgtccatgtgtccagtgacttctcagataatgtttttagtaaagatttactgagagagttcagattggttcagtcctatcaccactttttctagaagtsttgcagtgaggttcttctaaaagaattgttgtgtaggaaacagcacactgcctaatctttgcattgacagcactgaaaacaagcaagggtcggagagattcttcactgtcttcattataattgttgcttatgggtaccctgttatattctgatttctgttgcaattttacttgttctcttttgttattccacctactgaattgaggaattacatttcagttatctcttccaaagaggatcttcatcttaaatttactcgctttggtgggcacatgtattttccctccagctgcagccatcttgtaacaattttcagctataaagaattttccttgatttaatttatattttcaactagtgataaaatacattgcttctattccagtttcactgactactatgaataattattcaacagcctctccctaatcctccaaccccagcctgttaagcaacgctttgtcaggagtttaaattcagtgcaaagaagtaagatttccacagtttaacctgcagttcagtgaagtaagttccttctagaatacttggggaattcttccttcttcagatcaaaatcctccagctggagcaaatgggagactaataaatcacttaactttttgtaatatttttttaaggaaaccatcagatctctgartttacccacgttggagtctatttatgagtgctgctattactgcttgagtctatggtatagtcccttaagtttgtttaagatcattattaatttgttctaagtcagccaaatcaacagaaaggtaaatatgcaccaatagaaagtatttttcaaaagttaagcagtttttggtaaaaaccccaaaccttattaatcttctacagatgacaactcacatattgctgatgattaaagatacacatgtgttacaatagggcttcagactcacagcccatctctctttttcttgatctttcagtaaaatcataatgctaaactggtgacttcacagtcatttccttggcaaaagattaatatcacaagcacagaggaaaaaaagcccccacttacacacaagtgtcttcaataacagtgggagaaaacagaatactactggcaaagtaaattgcttttcttcttaaaacttttcccatcctgccccatgtgtccaagtgtaaaagccctgctttgaaaatgcttcatttcatagatcaaacacttaagagaaaatgacaataataaagcccaaacatcctaggaatagctaggagaaaaacctctaagacagtgggaaatacatcagtgcagaaaaatgtaactgtgttgaatacactatttgtgtttcttatgtatacaattgagaactgcagtcagattttaaggaattatgttaaacttgatgctcaaacacttattttagggggtcctttcccttggttctctgcaggttctttagctgccagcttttctgagtgggaggcttaggtgataaaggattgttgtgagaattcaaattttttcttttgaacaatcatctgatgctcttcagaatgaagaccagtatattcaggtacatttacctgtgaaataaagaaacacataaccattaaaaacaacattcaaaatgcacactaaagattctatcctgaaataaatcattaacagcaggtctcagagatttcttcatcgagcaaccagtttgtttcagttacaaccaggtgtactgagaaaccccaacacattgccagttggctggggcctgggaggcagagcttgcaggcagctaaagaaacaatgctcctctggcaacttccatttatcctcccagctttcccaaggctagaagctgcaaagaatgggctccgtgcgcgtactctcagggaggagccttcaaggcttgtgcgcttttcaaagaaaccgggtaacagtcctttctgggagactaggtttacctgggaggaggctcgaatggcactgcgtggttaggcttccctcagacaaatggctttgccggcagtggggcggggatgtatgtggtgccacagatacagatgaacacctttctatgttttgagatgatgctcttcccttagtaacctaaggctgctatgactcttccagaacaccctgtggcaagtataatgaagccataactatcattttcaggggactcaaaccgtttctgaggatttttctacccccatcctcaacccatatatttgttagcaaatagttttcatagtctttttctaactataatttctcttcctcactttttttttttttttttgccttggattagggacacacctagaatcagtgttttcctttctatttaaccagaatactagtaccagattagcaaatgaaactacaggttgaaaactcacccagttcaacagattcaattactgtaatttggatttttaaamtatgatttgggaaattaagaccatataactcattcttaaacaccttcaaatatatcctcactatgctttatttttggtgtagaataaatagaaatattttctaaagatgctcaagagattattagcaaaggcaatatcatttatttttcccagatagctgcattctctcattaaacacacacacacacacccctaaggcttttaggtatatgaaaacttcatctcttaaatgccaagtgatccaagtgctggagctgcatctgagatcagtaattgtgcacacacactggtcactgagagcactggttcctgttggacagcaccttgactattttggtaggcagaaatgggtgtttcctgtgtccgttgggcaagcatatgtatttttactggttcatcttagctgtggatgcctaaaaatttggcatcaattgtttatagaaaggaaaagcagtctgacctgtcagccttgatattacctaaacctgcatcgaatgtggtaaaataatacaagatttgttttttaggcctgtttcatattttctaggcaatagatcaaatcagttcagggttcatttttagctctttaataaactgacagagtttgctggcagtgaaatgagaatgcacttttaacatggaagtgccatacagtcaaagttgctatttctgctatttattaataactagggaatacttgagaattgagcttagcatgttcaacagggaaactaagattctagtgcttttcattgtaatgagcactttctctcatttttctctcttcatctccatttggtgtctcatccccagtcccttgtgaattcatactctttccttgaaacttataagtgttttatacaccaaatcagcacagtgagaattaacaaatcattgatatgctttttctctcatactcttacctaaatcttgactcttccctcttctcgaaatgccctcccctagagatacacttcttccaggtccttattccaaagtcaccccaggtaggcctcttctgaccaccctatctaacatttcatatcaccttccttttttgctcccttagcattgctttctaccttccatgctttatagttcacttgttttcttgtgtactgtctgtctctcccactagaatgtaagctctatgaggccagggattgttgcctgtactccagagtctaaaacagtgcctggcatatagcaggcactccattaataaacgaatgaatggaagtcatttaccccaggctttggtttctttgatccatgataaatgatggattttcacagcctgcttgaatatggtgcaccagtgtctccatctcgttcgccccatccctgatggaaaagggcagtagatatctaagtgtgacatgtaccttcatctcctggagctgtacccagcatcaacgcagttagtgtaggggtgttcactgagccagcctttttggagaaactttctctgggctttatttctctcaaacaccaacatgatgttccttctgcctctgtctagaccttaggtctcttcttccccagctttttgaatagtcagtaaaattgattttagctaaacagcttattgcttttctttatattagagttcatttggataaagaagccagcatgacactacttgttggaagccaggaaaaaaacaattgtgtgtgctagagatgtttccttttgctacatttgcagccctggtgactgtgacataaatctattgagccttgccattgcttcgctgggttccaagaacatccaatacttgtctgatgttaagttttactgcccatgaaagcaaacatcacctctgtcatggccagttaaacagtatcttttcagtggacttctgcatatctgaaacccacccatccaaagccaaaagtaatgccgggggaaagattttatgctgccatgtttcttacaagggaagatcaagggtcaacttgattcataaaattactgcagtcatttttcagctggctgagagacttcacagatcaaaaaatacgtggctcctaaatgatttctgatatgcacaattctagtgttttttgttctcagcatgtggcgcaaagcctgccagaaaccatctttgcggctattgacaggcggattagaaatcatccacgatggtttccttcatttctctacaggctggtcatccatttaaactgcttaatgtgaattcctctcaaagcctgctttgtayatgcttttccctgacgttttgttcttctctttcagtgtggtgctcaccttgggcacatttttgatgatgggcctcgtccaactgggaaaagatactgcataaattcggctgccttgtcttttacacctgcrgatagcagtggcaccgccgagggaggcagtggggtcgccagcccggcccaggcagacaaagcggagctctagagtaatggagagtgatggaaacaaagtgtacttaatgcacagcttattaaaaaaatcaaaattgttatcttaatagatatattttttcaaaaactataagggcagttttgtgctattgatattttttcttcttttgcttaaacagaagccctggccatccatgtattttgcaattgactagatcaagaactgtttatagctttagcaaatggagacagctttgtgaaacttcttcacaagccacttataccctttggcattcttttctttgagcacatggcttcttttgcagtttttccccctttgattcagaagcagagggttcatggtcttcaaacatgaaaatagagatctcctctgcagtgtagagaccagagctgggcagtgcagggcatggagacctgcaagacacatggccttgaggcctttgcacagacccacctaagataaggttggagtgatgttttaatgagactgttcagctttgtggaaagtttgagctaaggtcatttttttttttctcactgaaagggtgtgaaggtctaaagtctttccttatgttaaattgttgccagatccaaaggggcatactgagtgttgtggcagagaagtaaacattaccacactgttaggcctttattttattttattttccatcgaaagcattggaggcccagtgcaatggctcacgcctgtgatcccagcactttgggaggccaaggcgggtggatcacgaggtcaggagatggagaccatcctggctaacatggtgaaaccccgtctctactaaaaatacgaaaaattagccaggcgtggtggtgggcacctgtagtcccagctactcaggaggctgaggcaggagaatggcgtgaacccggaaggcggagcttgcagttagccgagatcaygccactgcactccagcctacatgacaatgtgacactccatctcaaaaaataataataatamcaatataagaactagctgggcatggtggcgcatgcatgtagtcccagctactcctgaggctcagtcaggagaatcgcttgaacttgggaggcggaggttgcagtgagctgagctcataccactgcactccagcctgaacagartgagatcctgtcaaaaaagaaaagaaaaagaaagcagcattcaaatgtaagacaactgtaaaatattgagccccacttggtctaaaattcaaaaagaagaacgcctgtccatcgcctttttataagtccttctctccacacctaaaagcagctgcagctggaagggcacaaattccactgtgtaaaataaaatattaggggcaacacacttcatcaaggcagcaggaatgagagagagcagagaagatcaaggatgaagtcttgggtactgaaaaattcagtgctgggcagaaaaactgacagggcagtacaagtaacaaacagaatccaagtggggtggcccttgtgcacagagctccaggtgacctctggagagacatgggcattcacatggaaagctaaaacggaagctcaagtttcatactcaacataatcttctgtgtgacaaaggacaagccatgtagcctctctgtgcctatttcttcatgcataaactgggactcataatatttgtaaaatgtattgatactctcagggcaaattcactatattgctatacagttgagatcagtgttgtaaaattaaactgatctggttctaattgcctcaaaggccaaagcccaggcatttgaaatggaaagaagcagagaggaggctgacttagctgattggtatggaaacagttgggccaagagccagaatttccctttgtagcaacacggctagttttactttgagaagctctgctcagctgctttataacattaagtctggcggaatggatgtcactgtgcacaataaagttttcacaagtataaacaatggtgatgtaagtcaacattgctgtagccaggtgtgaaggttgtatggtgtgtgacgaatgtacatcatgtttgtaggtttggatgctaatcttgaattgtagyttaaaaahtacgtatttttgtaactctttgaaagtttatgaagactgacagctttccttgtaagcactaagagaaaaaaaagaaagagggacatttgacaattttaaagaaacaacaagaaattagaatgaaaatctgtgacaaacagcgtcagtgtggccatgtccacattcctacatgtctctctctacaagcacctctctaagaagcctgacatcccggtggactctttatagtcatgtacacttgattccagatgagctctggtcttatctggatgctcagataagaggtttctatctgagcatccagatgttccctcaggttccaagacatttcaccccaggccctgggttcactctggaattcgtaggcttcacgtctctctagaaatgacgtgtaaaatttaagaccagacctcagccatcagcgtccagaccatccwagaagtctttcccaatctcacagagaaagccctagtatttcccagtgaccccaggattccacgttggggtggccaaagaaataggtctctcagggctttgccacagcctccagcccatccttcagaggcacacacagcacctctcggctgctccagctctgtaggatagcctcccctggggtccgtgggacgcgggccacagtgttgaggtagacaaggaggatcagtgagaggcctcttccctctccacagagactggattgtcattgttccttcatttatatcgtagggcttaacatttcactcaaaaaaaagcccctctttttctaatccttagtctttgtttcaaggaaagccagtttttcttctaccacattttccaggatcgactttaagaaaaatgcaacatctattgaaaaaaagtggggtgtatgcatgtggtttaattccagattgcttttgggtttaagtggtatcaaatttcagtatatttctgtcttatgtgaaagaaatatattactaaaacgtcagtgagcaataatgtcagctgtcaagcactagatttatttttgcaggatatggagtgcaatgaactgagtcaatatggcaaggtgtatgtgatctgtgggagttatgccatttaacataggaagtgcatgggactttccctctctgcactccagctcttactgtaccattagaagatgcagaattctgttggtgtgcaaaaagtatagccttacattcaagcagaatggatctgaagaaagcagcaatatctgttactagagaacattcccatgtgtttaaactcttcacttcttagatgcatttaaattcttaatgcaaatgacgtagcaatttgaaaacttctccgtattacttgtgtttaaaatgtcttgctttaaatacaaaacaaatggtaaaggggattatcttttgtttagatggttaaatattatttttgccttagatagctttgtaataatttttctccagacagttcaacacttttgaaaaatgacatgaattttcattaaaaacccttttcctatgtttattgtatacaagaattatgcaataaaatttctttataaaaatattttcttctttgattcctgaagactccttttattttcagcacagatacatggactggagtttgtagcagactgttctgtttgcctccttaaccagctgacaagtctgtagtctatatggagagcctttcatctgatgcagtctttggaagttgggtctcttacagtagggtcaagtccaactctccacaccacaggccctgggagaggcctccagggatctgaaagactggaggaaagggaaacatttgcagaattactcaaccttcacctcacctcagcaaaatcttcagcagcttgtgtatgtttcttgcttaaaatatggatttgggagttccaccataaaactctgtgggtaaaaatgcaggaatgataccacgctgatgccttggcttctgttaaaaaatttgacaggaaacttacactatcattgagggttgttctctgtggaagtatattaggagctttccactgcttacagatgatttcactgataaaagccatctctacagataagttttggtattgtattatttgttgttgaaatgttgagttgttttgtattgttgatttatttactttaggaggcagaagtgggatgatgaagacttttgttcttcagccaattctttaagtcatactcctggtatcttaaaattcacaggccagcaactttatgtagtataccttagagcactgcttttcatagtgtagtcctcagacactgaggtatcagcatcacctgggaacttgccagaaatacaagttaatcaaaagttctgggctggggccttagcaatctgcattttagaaagccctccatgtgattcttgtgcttaaccactgccttggaacttttagtgagaaaacttcaattagtattaattttaaaagcatttatatctgaccctcgaaaacgacttttttttcatcagtccttttctttctataggggtgggtggatagtttttccaaaatgtcatgccttgtagcgcttctcgtccctcactgcccatttgtcttgtccaggaggactagtctgtcctcattcactagcaccactttaattcctattagcatttctggactgagcctgggctgcccagtggtgcttcccagtgcctttctagaccacaggatgtccatggcagggttcatcacagtaattccaagaattagagagcagacttcagtgtataaatttacatatcacctttctcatctcttctattttcttatacttcctttcaaaattatcatcattttttttaaccatttaagatatttcttcaaaggtgccatgtacccaaatcttcaactctttctttttgtcagaaaactgctgttacctagatcttaacaacaaaacgacttttggaagatactgacattcgaaaaaggttgaatttaaaaactgtgtttgggacaagcttactagcaccccatacaggtttcaaaccagagctcatggttctttacacagcagattgaaatttcaccatattttgatgattttttacctgaaaaagccctctgccatagaagaatattctggcaagaatgcttcccatacacttactcccaagaggtcagtcttgtgggccagtctaggaggaattggcccaaaaatgactgtaagctctgaatgaggcagctctgacaccccttgcccaaaacacctgaaaggctgtcctgtgggtgtaaagagcttttatggaaccatcatgaaataaaaccatggtgacctgaaatttggtagccaaatcagattcctagcccacatgagattttcctaatttttagttgattacaaaaccataccaacttgtcagattatgaatgccagggagttagtttctttctttctttctctatttttttttttttttttggagtctcactgctctgttgcccaggctggagtgcagtggcatgatctcagctcactgcaacctctgcttcccaggttgaagcgatcctcccacctcagcctcctgagtagctgggattacaggtgggcaccaccatacctggctaatttttgtatttttagtagagatggggtttcaccatcttggccaggctggtcttgaacccctgacctyatgtgatctattcacctcgccctcccacagtgctaagattacaggtgtgagccaccatgcccagccaaggagcctcattcttatttcaaggttttcaacgctcctccctgcagtgtctaccctgctattcccagtaagcatatactcactcacccttattatcatggaaccagacaaattttctggaataagcagaagggaaagtcagtcagaaattaataagtgcttagttcagcacagccccgacatgggcaaggtatagaagcgtaaataactagaaagcaaagtaaaagaggttttatgtataaatacagcccaggagagagtcataattgttaagttgcagttgcctgaactttattcccatggccttcaatcccaccacaggatttctttttaccttaatgatactgtggattgaataacctctgtcaataagtcaggcacttgatccattatttctactgtgaggtaggtagtcttatcctcattttacagatgatagtgctaacagctcaaaaaattaagacaaattacatagctagtccatggccaagctaaaattgaaatccaagttcctgtgacttcaaacactgagcccctagctccactctgggctgcctcccatgtaggacactggctacttggatagtgttcagctgtggtgggtttgaacctgggggaaaaatgtatatagcatttcttatttgtttcaagttaactgcaattcacacttccgaaacacattctgcattgtgactgtgttatttcagagaggcctaattaagccttcgtacgtcttgattttcttacactttggtgacagaaagtttcatatttttcttcaaagggctaactttaacactcctaataattcttttttttttaattaaaacaatttttttacttcaatagcttttggggtaccagtggtttttgctaacacggatgaattctatggtggcaaattctcagattttagtgcatccatcacccaagtaacactcctaagaattttaactaccacagcaaaaaaagtcctattctggattcatatagaaaaaagaaagaatagaggtgatactaaagatgcatttaaccaaaatattcagtttctggcatagctgatccagctcatcctttctcatccaaaaagatataaagcccaggtggtgggggtggggtggctttaccaatgtcactaagtcagagtctaccatgggagggtgaagaaggaggacaggttcgtgagggctctcaccacactcagagcatgtctgcaggacacatgatggacctatcccaggaactgatggaataaagaggtttgtttctgtttgattacaattcatgacagattgataactgcagaggcattcaaacttggggttttaccccccttctctttaacaccagagcttataaggctattcaggcatctggtgtttgttagacggctgtgttgcatcatccttatgattgctggggaacatctcctagcattcgaacgattggaggaaagactatggggcacaaaatggcctcatccggtttacatctttattactggcttctcgcatacctgcttacatctggaaaaaatctccaggtaaacctcttgggctctttctctaaagagtaactgtaattattagggctatacccgaattcagcttagaataggtatgtcgctgaacttcagccaaaaccctgtgcctgtctaaaagagattttctttttttacatccaattacataggaggggccttttgcccacacatggccagtggggttcctgattctttatgcccaaggcttctatttatgcccttagggaaaagacagggaaactttagggaagaaacagagatctcttcaaatctcctcagtgttttttcctcactaccaaatcccagaattctaatatggattgcagatcatgtcaaaattttacaaatgctaaatctttaccctgctaggtactatcacaaactttaccttactaaccaacagcatcaaaacaaaacaaagaacaacaacaataaaaattacaaacaaagccaactaccatctctgtttccagcctatccctctagtatatggagttcatccattcagcatgatttattgagcacgtactagggtaccaggtaccatgcttggcacaggaaaccccaaactgaataagactccctgcgtcatgcaattagctggaaaaacagacctgcagctaattatgcataatactggcatgttgcatagggttatgcagaagtgtgaataaaatgtaatgaaaactcaactgggagaaggatgaattatcctcccctagaaaagggatgaagcagggagagtggcagtcaaggaacttcacttagagatgaaagtgcagctgggtcttgaaaactacgtagtctttcacataggagagacgaaaacaaggtggttcagagaaacaattggggtgtgatctgtaactttttcaaacacatttctgattattttgataagtagttgttgtctaagatcatctcataagatgcttttttccatttgcttcccccctctccttttaagacatatatatatatatatgtgtcttaaaacatgtatgtatatatatccaggcacacttcatcttactgtgcttcactttattgtgatccacatatagtgcattttttacaaattaaaggtttacggccaccctgcattaagcaagtttttggtgccatttttccagcagcatgtgctcacttcatgtctctgtgtcacattttggtgattcttgctatatttcaaactttttagtgtttattattacatctgttatggcaatctgtgatttagtaatctttgatcttactctcataattgttttggggcaccaccaactgagtctatataaatggcaaacttaataaatgttgtatgttttctgactgctccaataacaagtcatttctctgtccctctccctctccttgtgcctccctatttcttgagacacaacaatattgaaattaggccaatgaataaccctacaatgccctctaggtgtccaagtgaaaggaagagtcacatgtctctcactttaaatcaaaagctagaaatgattaagtttagtgaggaaggcaggtcgaaagccaagacaggcttaaagctagttcacttgcaccaaacagttaaccaagttgtgaatgcaaagaaaaagttcttgtaggaaattaaaagtgctactccagggaatgcatgaatgataagaaagcaaaacagctttattgctgatacagagaaagtttgagtcatctagatagaagatcaaaccagccacaacatttctttaagccaaagcctaatccagagcaagaccctgactctcttcaattatattaaggctgaaagaggtgaagaagccacaaaagaaaagttcgaagctagcaaagggtagttcataaggtttgagtgccaggtgtaatataatagtgctataatgtaaaaatgcaaggtgaagctgcaagtgctgatggggaagctgcaagttatccagatgatccagccaagggaattaatgaaagtggctacaccaaaaaagactttcagtgtaaatgaaacagccttctattggaagatgatgctacctaggattttcatcactagagaggagaagtgaatgcctggcttcaaagcttcaaaggacaggctgactttcttgttagggtctactgtagccggtggctttaagttgaagccagtgcttatttatcattctgaaaatcctaggaccctgaagaattatgctgaaactactctgcctgttttccataaatgaaacaacaaagcctggataacagcatatctctttacatcatggtttacagagtattttaagcctgcagttgaaatctactactcagaaaaatgatcctttcaaaatagttctgcttactgacaatgtacctggttacccaagagctctgatggagatatacaaggagatgaatgttgttttcatgcctactaatacaacatccactctgaagcccgtggatcaaagagtaattttttaagtctttttatttaagaaatacattttgtagggctatagctgacatagacggtgagt

SEQ ID NO: 93517 - DNA, 12491 bp, Homo sapiens
caccttaatagataaccaaaaaaagcttttgataaaattcaacatctcttcatgataaaaccctcaacaagtaggtattgaaggaacatacctcaaaataataagagccatctatgacaaacccacagccaatatcatgctgaatgagcaaaagctggaagcatttccccttgagaactggaacaaaacaaggatgccactctcatcattcctattcaacattgtgctagaagtccttgccagaggaatcaggcaagagaaagaaataaaaggcatgcaaataggaaaagaagaagtcaaactgtctctagtcatgcacaatatgattcaacacctaggaaaccctaaagactctgccaaaaggctcctggaactcataaatgactccaataaagttttaggatacaaaagcaatatacagaaataagtagcatttctacacaccaataacattcaagccaagaggcaaattaagaatgcaatcccatttacaatagccacataaaaaaataaaaatacctagaaacacatctaactatgaaggtgatgacctctacaagaagaactacaaaacactgatgaaagaaatcaaagatgacacaaaggaaaaacattccatgctcaaggattgaaagagtcaatatcattaaaatggccatatcacccaaagcaatctacaaattcaacgttatttctatcaaactaccaatatcatttttcacagaactagaaaaaaaactattctaaagtttatatgaaacgaaaaaaaaaaaaaaagcccaaatagccaaagcaatactaagcaaaaagaacaaagccagaggtgtaacattaccagacttcaaactatgctataaggctacagtaagcaaaacagcaatggtactggtacaaaagcagacacagagaccaatggagccgaatagacaacccagaaataaagccgtacacctacagccaacctatcttctacaaagtcgacaaaaataagcaatggggaaaggactcctattcaataaatggttctgggatagctggctagccatatgcagaagaatggaactggaaccataccttttatcatatataaaaattaactcaagatggattacagatttaaatataagaactcaaactataataatcctagaagaaaacctaggagacacatcagccttgggaaagaatttatgactaagtcctcaaaagcaattgcaggctgggtatgtggctcatgctgtaatccagcactttgggaggccaaagcaagaggatcacttgagtccaagagtttgacaccagcctggacaacatagtgagaccacatctctacaaaaaattttaaaaattagctggcgtggtggtgcacaattgtagtcccagctccttgggaggctgaggtgggaggactgcctgagcccaggacgtcaaggctgcagtgagctatgattacaccactgcattccagcctgagtgacaaagcaagaccttgtctcaaaaactaaaaataaaaataaaaataaaaattgacaagtaggacctacctaattaaatgaaagagcttctgcacagaaaagtaaaatatcaatagagtaaacagacaacctaaagaatgggaaaaaatatttccaactacgcatctgacaaagatttgatattcagcatctataagaaacttaattcaataagcaaaaacaaccccactaaaaagtgggcaaaagtcatgaacagacacctctcaaaagaagatatacagacagcccaccagcccacaaatgtggaaaaatgctcaatatcactaatcttcagagaaatgcaaatcaaaaccacaaggagataccatctcacaccagtcagaattgttattattgaaagtcaaaacaacaacaacaacaacagatgctggcgaggctgcagagaaaagagaacacttatacactgttggtggaaatgtaaattagtttagccccactaaaaagcagtttggagatttctcaaagaacttaaaacagaactatcattcgacccagcaatcccattactgggaatgtatccaaaagaaaataaatcattctatcaaaaagacacaggcacttgtatgttcatcacagcactgctcacaatagcaaagacatggaattaacctatggaccagataaagaacatgtacaacagtggactggataaagaaagtgtacatatacaccatgaaatactacacagctgaataaataaataaataacaaaattatgtcctttgcagcaacatggatacagctggatgccattatcctaagtgaattaatgcaggaacagaaaatgcatgttctcagtaataggtacgtggtaagcattgggtactcatggacacaaagatggaaacaatagacactgggactactgggcaggagggagggaggggggcaagggttgaaaaactaaccgttgggtattatattcactatgtgggtgacaggatcattcatactccaaacgtcaacgtcacacattacacccatgtaacaaacctgcacatgaatctacagtaaaaattgaaattataaaaaaaaaaaaaagagaagattgctctggcagctatgtggagaatggacaggaaggggcccagaaaggatgcagacacgccaagtattagaggaaggctgaagtagacatggagagagatccactggaaagttgctaatatctggaaccagggtaaagagaattgcacaaatataaaagaggattagggaataaaattgatcttacctgacaatgaattgaagtataaaagtaaagaagcagtcgaggatgacacctggtctttaaccaaggcaagatatgtgtgaygccatttttcaagggaggaaacaattgaggaggacttcgtttggggagaagagaatatcattactttggttttggatgtcttgagtttgaatgtgccattgagatatctaagtggagatattgagtaaagagtgattgaaaatccttatgaaacaccggtgtatagttggtatttggaggggcatttgcatgtcgatcattagaaaaggaagtagaataaaaaaaaataaaagggcccgagtcttgaggaattccaacatttaacggctagtagtataagtattgacctgcaaaagaaaattaaaaggtgtggcccaagaagtaggggagaaagcaggaaagcagggtgccaagaaggaaaaagaagcaatagtctctggttgcaaaaagccagatgagatgaagactgagatgtgttcattgcatttagtaacgtggaagacattgattacttttgtaagagctatctttttcaattgagtgatggggacacaggcaagattggggtagactgaggactgtaccttaaaacaacagagaatgtgttcatcgcaagtcaaaacagtattgttttgacttgaaaactgtttcaaaactgacaaacatcagatgcagtggctcacacctgtaatcccattaccctgggaggccaaggcaggaggattgcttgaagccaggagatcaagaccagcctgggcaacatagcaagaccctgtgtggatgagaagtttttttaaaaaaatagctgagtgtggtggctcatacctatagtcccagctcctcagaaggcccactggagcccaggaggtcaaggctgcagtgagctatgatcacaccactacactccagcctgggctatacagcaagaccctgtctcttgagaaaaaaaaaaaaaactgagagagcaaggagttgcctcaaatgaaaatacaatttatcatattaacttgtaagttaaaatgtattataaaactcaaatcaggcagttatatgaagcttgagcatcaatataagtaatgttttttaaactattatcatgagatgaaacatgaaacaaatatcactctgtcatattaactgttgcctaaagtatattttgctgttgttttttactaattcaaataataattgtttgtatggtgcattgcttcagaggattttcacagaactttttccatatgaatttgacaacatataccagggggataacctgaaaaatccttgtactggatacctctcgggcagcacttcaaacccacctggctgcatctcttcctccagcctccgccaggggaagagttttacccagctttgatcagcttcgctcagatgtgatctgacaggacctagcctcaggcatccagcatggaactcttccttcctaagtgggacttgcctgatgccacagcatgacatgcccaagagaacccacttggcattcacgcatgtgcacccagaactactggactactgggctcactcttggccagtgggaacaagggctgatggaggaatgctcactccttttttctctgggaagacatttctgagacccccttcctaaggctcctagaaattccaaaccatcatttgggcagtgacatctccctaccgccttctcttccagctttccctttttccctcttcttcacttctgctccctggagtcacatttcaaaatattcacacaccagccttttatctcaggctctgctttcaagggatcctaggctaagtcaatattctagttcagaaactataaatgaaggccctttggctaggcagaaagggaaactaacattttctaaaaactaaatttgtgctccatatttactatttcacgtaacactcaaaagaactacagactggctcaattgggaaactggagtccaagttattcaaagctacacagtttcactgactttatacgttcttattctccatactgcttccagtgatatcttcctttgactgtggtcatagatatatttttggaagtgaataatgaagataaatagcaatagcaactattatgcattgagggcctatttgtgccagacaattggctaagcacttaatatttaatcttcactgtaactctacaagctatcactagcttcattttattccaataaaaatggaggctaacttttccaacattctctactgatgaaatgactgctaatacttgtgcttactccgtagccctaatgtctatgatcacatttaatcctcacacctacccatgaaataggttcctgttgatcatcacattacagacccagcagctctaaagcttatagatgccttttcccctaccaggctgcctctcattacaggaagaagacagggagaaaaacatgacaagaaaaaatgatctaccataagcacttcctatatcaacgtgctttgaacagagcaatagtcacacccatagtgcctgctaaaaatatgactatggctaatttcaggaaggatcccttcacttcagcactactgacattttggcctggatagttatttgtagagggaagtgtcctgtgtgtcgttggatgtctggcagcatccctggcctctaacatctagatgccaatagcacctcccttccattgtgacaaccaaaaatgccttcagactttggcaaaattgcttccagttgaaaaccactggtttacgacattttaaacaaatagttttaattctgaagtttgaattatatcagggcaatggtccttcgctgtttgggaattcaattgtggagatacaagcgggaattcaattcagtaatcccatctgctcctcccctactcttattcccttccttccattgtttcttttgcaaatcccaaggatggcttctacccaataaaaacagtctcatgcacaggaagggacttgttcctgggccatggcgcccccttcgttgtcatcagatgtctctccttcaagtcaaaattttgtctagccctgattatcgtactatctcccaactaaaaacaaaacctatttaattggctctactattaaataacaagcacaccatgttatgaacattgtttctatatttacaaatccaaaacatgattgaaaatgtcactctcggctttgcagcagctgctgccaccaccaggagccccaaactatcagccatggtcaaccccaccatgttcttccacattgccgtcaatggcgagcccttgggccatgcctccttggagctgtttgcagacatgttttcaaagtcagccaaaaaccttcatgctctgagcactagagagaaagaatgtggttataaggtttcctgctttcacaaaattattccaggatgtatgtgtcagggtggtgacttcacatgccataatggcactgatggcaagtccgtctacagggaaaaatttgatgatgacaacttcatcctgaagcatacaggtcctggcattttgccatggcaattgctggacccaacacaaaccattcccagtttttcatctgcactgccaagactgagtggttggatggcaagcatgtggtctttggcaaggtgaaagaaagcatgagcattgtagaggccatggagcactttgggtccaggaayggcaagaccaacaagaagatcaccattgctgactatgaacaactctaataagtttgacttgggttttatcttaaccaccagaccattccctctgtaactcaggatagcacccctccaccccatttgctcgcagtagcctataatctttatgctcttgctgcagttccctttggtttccctttgggagagaagtccctgctctagccaagggaaggggttccatgttttccttgttcccttccatgcctagctggattgtagagttaggtttatgattatgaaataaaaactaaataacaaaaaaaagaagtgtcactctctcagtagaaacaatattcccataatcaaacatccaaagcaaattgtatgatttttttgtattatccaggatttcaagactctgtttcagggcagaaaagccaagtagaaacaatggtcaactttcagcatacctattttcagcagcctacttgctgcttcttatgcaaacataactattatttgtattattttgtccaaaatgttaatacgaatttatgtaaacattctaaatatatggatcataaataaatactactgaatcaaaactataagaaagcaatatgattggccctagaagacttttatatattttcgtaaactattagttctttttaacatatgttatgcaaacaggataatgtagatatgatacataagatggcaaacactatgagtacacactctcttagaaatttggtaaaatacggccaggcgcggtggctcacgcctgtaatcccagcactttgggaggccaaggcgggtggatcacaaggtcaggggttcgagaccaggctgaccaacatggtgaaaccccgtctctactaaaaatacaaaaatgagctgggcgtggtggcgggtgcctgtaatcctagctattcaggaggctgaggcaggagaattgcttgaatccgggaggcggaggttgcagtgagccgagatcgcaccactgcactccagcctgggtgacagagagagactatgtctcaaaaaaaaagaaagaaagagagagagagagagagagagagagagaaagagaaagaaagaaagaaagaaagatgaaagaaagaaagaaagaaagaaagaaagaaagaaagaaagaaagaaagaaagaaagaaagaaagaaagaaaggaaaagaaagaaagaaagaaatttggtcaaatacaaagtgcttctgaaaactagtctcccataaataactttcataaagttccatcatattcctataatgtcttttaaataaatctagtgagatgttgctaaaacggcaaactcaaagatgacatcaaaattagcccaataatgaaatttgtccatcttagaagcattttacattgatatttagaggtatagttttccacttctagagccaatttttcctaagtcattttttctaaaacatgtttggaagattgaggcccacacagcagacatctgggccctccctaatagaacaggttttattagattcccaacccagtgaaagcaaagaaacaaaaatgtgcttttcgaagatggccgaataggaagagctccagtctgcagctcccagcaagatcaacagagaaggcaggtaatttctgcatttacaactgaggtacccagctcatctcattggggctggttagacagtgggtgcagccggcagagagcaagcagaagcagagtggggcgtcacctcacccaggaagcccaaggggttggggaactcccttccctagccaagggaagacatgaagaactgtgctatgaggaacggtgcattccagcccagatactacacttttcccatgcgctttgcaacctgcagaccaggagattccctcgggtgcctataccaccaaggccctggattgcaagcacaaaattgggtggccgtttgggcagacaccaagctcgctgcaggagtttcttttcataccctagtggcacctggaatgccagcgacacagaaccgttccctcccctggatagggggctgaagccagggagcccagtggtctagctcagtggatcccacccacatggagcccagcaagctaagatctgctggcttgaaattcttgctgccagcacagcagtctgaagtcaacctaggacactagagcttttggaggcggggggctggggggcgtccaccattactgaggcttgagtaggcggttttcccctcacagcataaacaaagccaccaggaagttcgaactgggcgaagcccactgcagcttggcaaagccactatagccagactgcctctatagattcttcctctctgggcagggcatctctgaaagaaaagcagcagtcccagtcaggggcttacagataaaactcccatctcccagggacagagcacctgggggaagaggtggctgtgggtgcaacttcagcagacttaaacgttcctgcctgccagctctgaagagtacagtggatctcccagcacagcgctcgagctctgctaagggacagactgcctcctccagtgggtccctgaaccccatgcctcctgactgggagacacctccctgcaggggtcgacagacaccttatacaggagagctccggctggcatctggcaggtgccactctgggacaaagcttccagagaaaggaaagggcagcaatctttgctgttctgcagcctccattggtgatacataggcagacaaggtctggagtggacatccagcaaactccagcagacctgcagcagaggggcctgactattagaaggaaaacaaacaaacagaaaggaatggtatcaacatcaataaaaaggacgtccatacaaaaacctcatctgaaggtcaccaccatcaaagaccaaaggtagataaatccatgaagatggggagaaaccagcacaaaaaggctgaaaattccaaaaaccacaacacctcttctcttccaaaggatcacaactccttgccagcaagggaacaaaactgaacagagaatgagtttgatgaattgacaaaagtaggcttcagaaggtgggtaataacaaactcctctgagctaaaggagcatgttctaacccaatgcaaggaacctaagaaccttgaaaaaaggttagatgaattgctaactagaataaccagtttagagaagaacacagatgacctgatggagctgaaaaacacagcatgagaacttcatgaagcatacacaagtatcaatagccaaatcgatcaagcagaagaaaggatatcagagattgaagatcaacttaattaaatagagtgtgaagacaagattagagaaaaaaagaatgaaaaggaatgaataaagcctccaagaaatatggggctatgtgaaaagatcaaacctacatttgattggtgtaccagaaagtgatgaggaggataggaccaagttggaaaacactataaaggatattatccaggagaacttccccaacctaccaagacaggccaacattcaaattcaggaaatacagagaacaccacaaagatactcctcgagaagagcaaccccaagacacataatcgtcagattcaccaaggttgaaatgaaggaaaaaatgttaacagcagccagagagaaaggtcgggttaaccataaagggaagcccatcagataacagcagatctcttggcagacaccctacacgccagaagagagtaagggccaatattcaacattcttaaagagaagaattttcaacctagaatttcatatccagcgaaactaagtttcataagtgaaggagaaaaaaatcctttacagaaaagtaaatgctgagagattttgtcaccaccaggcctgccttacaagagctcctgaaggaagcactaaacatggaaaggaacaaccggtaccagccactgcaaaaacataccaaattgtaaagaccattgacattatgaagaaactccatcaactaatgggcaaaataaccagctaacatcataatgacaggatcaaattcacacataacaatattaaccttaaatgtaaatggactaaatgccccaattaaaagacacatactagcaaattggatagtcaagacccatcgatgtgctgtattcaggaggcccatctcacatgcaaagacacacacaggctcaaaataaaagcatggaggaatatttaccaaggaaatggaaagcaaaaaaaaaaacaggggttgcaatcctagtctctgataagayagactttaaaccaacaaagatcaaaagagacaacgaaggccattacataatggtaaagggatcaatgtaataagaagcactaaatattctaaatatatatgcacccaatacaggagcacccatatttctaaagcaagttcttagagagctacaaggagacttagactcccacacaataatagtgggagactttaataccccactgtcaatattagacagatcaacaagacagaaaatcaacaagaatatccagggcttgaactcagctctgaaccaagcagacctaatagacttctacagaactctccaccccaaatcaacagaatatacattcttctcagcaccaccgcacaatcattctaaaactgaccacataattggaagtaaaacactcctcagcaaatgcaaaagaatggaaatcataacaaacagtcgctcagaccacagtgcaatcaaattagaactcgggattaagaaactcactcaaaacctcacaactacatggaaactgaacaatctgctcctgaatgactactgggtaaataacgaaatgaaggcagaaataaagatgttctttgaaaccagtgagaacaaagacacaacataccagaatctctgggacatatttaaagcagtgtgtagagggaaatttatagcactaactgcccacaagagaaagcaggaaagatctaaaatcgacatcctaacatcacaattaaaagaactagagaagccagagcaaacaaattcaaaagctagcagaagacaagaaataactaaggtcagagcagaactaaaggagatagagacacgaaaaacccttcaaaaaatcaatgaatccaggagctgttttttttttaaagatcaacaaaatagactgctagccagactaataaataagaaaagagagaagaattaaatagatgcaataaaaaattataaaggggatatcaacctgatcccacaaaaattcaaactaccatgagaaaatactataaacacctctacaaaaataaactagaaaatctagaagaaatggataaattcctggcacatatgtcctctcaagactaaaccaggaagaagtcgaatccctgaatagaccaataacaaattctgaaattgaggcagcaattaatagcctaccaaccaaaaaaaaaagtccaggaccagagggattcacagccaaattctaccagaggtacaaagaggagctggtaccattccttctgaaactatttcaaacaatagaaaaagagggaatcctccctacctcattttatgagaccagcatcatcctgataccaaagcctggcatagacacaacaaaaaaagaaaagttcaggccaatatccctgctgaacatcaatgtgaatatcgtcaataaaatactgccaaaccaaatccagcagcacatcaaaaagtttatccaccacagtcaagtcggcttcatccctgcgatgcaaggctggttcaacatatgaaaatcaataaacgtaatccatcacataaacagaaccaataacaaaaaccacatgttttctcaatagatgcagaaaaggccttcaacaaaattcagcagcccttcatgctaaaaactctcaataaactaggtatcaatcaaacatatctcaaaataataagagatacttaggacaaacccagagccaatatcatactgaacgggcaaaaactagaagcattctgtttgaaaactggcacaagacaaggatgccctctctaaccactcctattcaacatagtattggaagttctggccagggcaatcaggcaagagaaagaaataaaaggtattcaaatagg

SEQ ID NO: 93518 - DNA, 14639 bp, Homo sapiens
tcattttcacaatagtgattcttcctatccatgaaaatggaatgtttttccatttgtttgtgtcctctcctatttccttgggcagtggtttgtagttctccttgaagaggtccttcgcttcccttcttagctatattcctaggtattttattctctttgtagcagatgtgaatgggagttcatttatgatttgactctgcttgtctattgttggtgtataggaatgcctgtgctttttgcacattgattttgtatcctgagactttgctgaagttgcttatcttaaggaggttttgggcagagactatggggttttctagatataggttcatgtcgtctgtggtacatatacaccatggaatactatgcagccataaaaaggaaagagatcatgtcctttgcagggaaatggatggagatagaagccattatcctcaacaaactaatacaggaacagaaaaccaaacgtcacatgttctcacttataattggaagttaacaatgagaacacagggacacagggaggggaacaacacacactggggcctttcagaggaacagggggagggagagcatcaggataaatagctaatgcttgtgggccttaatacctaggtgatgggttgataggtgcagcaaaccaccacaacacatgtttacctatgtaacaaacctgcacatcctgcacatgtatcctggaacttaatataaaattaaattaaatttaaaagaaatcatatgtacttcataattatatacacctaatatgtacccataaaagttagaaaataaaaaagcatgacacagcaaaaaaaagccaatagctggctttctttcatgttaaaggtttgcacaaaagaataaaaaagagacagaagttctattaaatgatattcattaggcttaatatctgaatttcattaagctacccgattctcattatgccttaggtaggtaagcaggtgtacatttccatggatgcactgagacataacttttccccacattataatttacattcacatttttctttactatttttattatggttggcctgatttatagtagaaattgttaaaatgtcataatcaatatttatacctgaagttgttacagttcaatattctgtattttaagagggctcaataaatagaaactgaattgataattattaattaagtgtataatatccttgtttatactacctaaacaattcaatacaaacttttcttaaagaattacacccactcataataatatcatcaagaagctgtgaatttgctattcatctgtttcagtatggggtttaatagctgggccaatacaccwcggatctaaaagacactatacatatmaagataataacatatacctaggctttctatgtttgatgttccaatttgtttagacataaaagtcaccacttgtgtctttattttatataaattttttttaacagtagtacttctttctatgctggcagcttccaagtaactgcagaatggcaagaactacatcatttaacgaatattcatatcaaagagacagttataacatttttcatgccattgctcctttacccttcctcaacacactttgagaattacagtgaatttttgaaatcctgaaagaactatcttcaatccttacactaggctttaaaaaatatttttaaataatatacctttgaattaaaaagggaaagaaatttagaaataaatatttgtgggagaatatcacatcagcacatccaagataaaataatacatgagagttgagacttaaaagtggtataataaattgctagtaaaaaagcataataataatagataacataacattaacacaaaaatataagttcctcagagataagaatgtttgctttttgtttactttattccttatttctagaatgataaaagtccagaatgcctgttgaataaatgaatggttgaacaaataaatgagtgtgtttgatacagaaaagagatcatgattctcccagtcatccaaagcacatctgtgaacctcagtatacttgggagcaacaatctggaatatggaaaggtccagattccagcacaatgcactaggttctcagcataaaaatgaaaaatacaaaatcttggtgttcaaatgtccacagtccaaagccagatatataaatagttctgatacaatgatacaagtgcaaaaagagttatatgtattaaagggccatagactggctgaaaaaacatcatttgagcattagctaaaaagatgagtgagaggagggaagagtagaggcacgcaaagcaaaagtacagaagtcccaaaattcatagtgtttttggagaacagtaagctgtatatttcaaacttttaaccataacctgaagcaagaaatatacatacagtactttttttagacggagtctcgctctttcaccaggctggagtgcagtggcacaatctctgctcactgcaacgtctgccttccgggttcaagcgattctcctgcctcagcttcctgagtagctgggactacaggcgcgtgccaccatgcccagctaatttttgtatttttagtagagacagggtttcaccatgttggccaggatggtctcgaacttctgacctcgtgatctgcctgcctcggcctcccaaagtgccaggattacaggtgtgagccacgaaacaagttttatgaaataatacccacctttactcatttgacacatttagtattttctgatctattatttcttcttaatggtggtcaagttgcactaaattaaaatttcaagatcatttgtttgaaaaactgggtttgagcattgaatagacgtggcaagcagaccgctgaaatgaaaatactaagaatgctctgccagcagaactccaactcttctcccatgcaggtggtttgctgctgagccgcacggcttagggaagggctatgatctaggtccctttcctacttaaaacatctcactgtggtacaaaagatcagtaaagaactccttctctatatcaaataaaagggcaggaaaggaaagtgccacagaccttttttaatctgctctagggataatgtttggtgcttaccactattctatctagaagcattaacagtatttaaaatttatactattctcatttctgggagcattccacattctgtctatatctggatctatctcagagtttaccaagtcacattgtcacattgaactaatgaagcaaaactctctacatccacaatagactttgttcaagactatttattgagcactttctatgtgccagcttctgttgtagtgctaaggactgcaatagtgggaatacaaaagtccaagtctcctggagttgatattgtatagaaaacaaataaattaattaaatacatacagataataatgaatgctgggagggaacaaaatagtgtcttgggtttgaaaatattatttaaggaagccaggaaaggcctttttcatgaggtaacatttaagttgagacatgaaggatgagaagccactaaagtgaagtgctaaggagaaaaacaattttctcagcaccagaagagtatgcatgacgacctgacacaggaaagaaatgtgttattagaaaccagtatatcttgagcccaatgaagagttgggaaaaatggtatgagatgagatgggaagttacctgaagttactgaattgttccattaactaacacgggaagttactgaagaatgacatggcccaatgggttttataaaagcttattctttcagctatgtagagaagggattagatagggttgagattagaagctgagcgatcccttaggagactaattttcaggcaagtcaatatggaagattagactagggtgttgacaatagaaatggagaaaagcagatggattcaagatatattttggaggtagaaccagtgaaacttatattcagaattttcttaaaagagaccataaggaagtgaattgaaaattgggtgaaggaatgaatgtatttaaaaggaaaaggtgacattttgaggaaagaaagaatggcaaaagtatacactaagtaacaacctattaataaaagtaacatattaaagtggtcacatttacaactctaatctgatgtcctacactgggcctcaattatcttaaaataagatattaaaccaaggcagaaaaagagaagaaatacttcaaggtttttagccttaaatggttgagcccaggccactgaaaaaaatacaatttacccaattaaaataacgaagcaagatttaactaagatcattttagtgagaaacagttgttctcaccctggctgcccattagaattccctggggagcttttaaaaactagaagcccaggttccactggagtgattccgatttaattggtctgaggtagacccaggcatcggtattttttaaaaagctccttagagaattctaataagcagccaggatggagagtcttgagttagaagtagagtacagctaaggatgccatatcaataaacctattctgctaatgaaagattaatagagaaaataggatgaaagaactttgatcccagacaaggaatacaggcctattggttacaaggacataattcaagaccacaagaaaataaaaatccattttactctgagtgacttttttttcaagctggcagaaaatggcattatgcccaccttgttaataacacggacactcatacagatgccacacatatttaaaaacatattttatttccattatggacaacaaaaagagagtaacagctgatggttgactacaagaaaaatataagagaaagaggagagtgtcaatattgcccggacaagaaaacacaggaaaaaatgaattgcattgagaaagtgattaaaagaaattgattccgttatttctgagagaaaaaaacgcatatatatatagaatacacctagcaacgagtttgcttgtatcacatggctcttgagtctgcacttttcaggatttaactcttaagagagccacagaattatcagagcagagccgaaagccaagtaactattcttctaagtagaaccagaaacctagttcttccccaactgcaatgaagattcgctggtgggtgaatgggcaactaaaggccagagaagttctattatttgccctaaatcactcaactaattagtggtcatactggaatcagaaccaagattttgcattgttaggttttaattttgttacatttgcactctaactgcactgaaaacagaaaaaagaaatgcgtagtgcagtttctaaattgccacagctggagcactttaagagctacaattgtccagttaaggcggtagtgggtggatggtgctgccatgttaattcggtggaataaaaccagaggtgagttaggccgggcgcggtggctcacgcttgtaatcccagcactttgggaggccgaggtgggcggatcacctgaggtcgcgagtttgagaccagcctgaccaacagggagaaaccccgtctaccaaaaatacaaaattagccggccctggtggcatgcgcccgtaatcccagcaactcgggaggctgaggcaggagaatcgcttgaacccaggaggcggaggttgcggtgagcggagatcgcgccattgcactccagcctgggaaacaagagcgaaactccctctcaaaaaaaacaaaaaacagaaaaacaaacaaaaaaaacagaggtgagttccgcagaagaaacaaaggtggattattagtcttaagtgtgcgtgcctacttcaggaagggagtgaaagcaaaaaactgaggagctaagggtgggagggggaatgaaaggatctcagaatgtgggcgtcgtgggtgggaaaagggatgccaggacaccagaagagcaatacaaaacagctcccgtgagcaggcacaggagaccttccgcgccgccggccgggcgaccccgcaggaagtaggaaggacgagcgcgcactacaagtcccagaagcccccgtttcctggagcccgcgccgtgccgcgctacgcccgccgggagccgggcagagcggccaagatgtcgcagcccaagaaaagaaagcttgagtcggggggcggcggcgaaggaggggagggaactgaagaggaagatggcgcggagcgggaggcggccctggagcgaccccggaggactaagcgggaacgggaccagctgtactacgagtgctactcggacgtttcggtccacgaggagatgatcgcggaccgcgtccgcaccgatgcctaccgcctgggtatccttcggaactgggcagcactgcgaggcaagacggtactggacgtgggcgcgggcaccggcattctgagcatcttctgtgcccaggccggggcccggcgcgtgtacgcggtagaggccagcgccatctggcaacaggcccgggaggtggtgcggttcaacgggctggaggaccgggtgcacgtcctgccgggaccagtggagactgtagagttgccggaacaggtggatgccatcgtgagcgagtggatgggctacggactcctgcacgagtccatgctgagctccgtcctccacgcgcgaaccaagtggctgaaggagggcggtcttctcctgccggcctccgccgagctcttcatagyccccatcagcgaccagatgctggaatggcgcctgggcttctggagccaggtgaagcagcactatggtgtggacatgagctgcctggagggcttcgccacgcgctgtctcatgggccactcggagatcgttgtgcagggattgtccggcgaggacgtgctggcccggccgcagcgctttgctcagctagagctctcycgcgccggcttggagcaggagctggaggccggagtgggcgggcgcttccgctgcagctgctatggctcggcgcccatgcatggctttgccatctggttccaggtgaccttccctggaggggagtcggagaaacccctggtgctgtccacctcgccttttcacccrgccactcactggaaacaggcgctyctctacctgaacgagccggtgcaagtggagcaagacacggacgtttcaggagagatcacgctgctgccctcccgggacaacccccgtcgcctgcgcgtgctgctgcgctacaaagtgggagaccaggaggagaagaccaaagactttgccatggaggactgagcgttgccttttctcccagctacctcccaaagcagcctgacctgcgtgggagaggcgtagcgaggtcggaggggaaagggagatcccacgtgcaagtagggggaatatctcccccttttccctcatagcctctagggagggagagtgacttcattctccatttgaagagattcttctggtgatgtttacttaaaaagtgatccccctcaacaacggatacagcgtgcttattattgggcatttagcctcaaaagcatgtagtaccaagcacttgtatttccgtatattttgtttcgcgggggagtgagggggaagaacacggatgaaaatgtcagtttttgaagggtccatgcacatccctgacacctcacaccttatctaagtctgaagctggggagaaaggrgttcatttagacttcatacatttccagtacgactttagtatctctccagagccatattttctcagtccgaattaattccccctccctaggtgcctgtaggctatggtacttcttcctcattgttttctaggtaaacttcactactggtaattaaggggaaggatatgaggaagcagtttaaatagccctgttctcattactctgaccacatacatcatagggtgctaaagttgatgaacacattaatccgttaagtaaaatggactttgtaattgtacagcatacctaagaaactcagaaggtgcatttaagagagagacctgaaagaaatagtatggatttttaaaaattcttgtctctactattataaccaaaaaatatttcttgtatgtcccataaaaatatttgtgtaattcttatgaaacaggctggtagaggaggtttctgagcctagcccaagggcttattcatcaccatgggtaaattatttaaactcacttaattaaggaaaatattttcccagctagaaaagtatactcattctcatttaaactctctcatttggagggatcatgtgagttggcctacttacaagtagtgaaagttcccttttcagttttgttttgttttgttttgtttttctctttcactcagccaaatgtgaaagttgtgaatttaggaaaatcacttgtaatgaagtgtgaatcttgttatcaaatttatttctctgatgtttccttccttatccttgtagccaataaaacattgacattctcacgttttatagatgaggtaaaaagtcttgtgtgctgtgagttataatgcttttgcctttttaatattattagttcttaagtgttacagccccttcagaatataacttcaggacaattcaaactatgcttaatgtatgattttcgagcttctgtatgctaagaaaataggtgtgaaaaactggtgttctgaaatagcctaacatttattgtaattctgaattttctgccsttttattcattgcatattaaagtattagagtataaaaactaatttgctaaactttggttgtatataacacagatcttccatcatggagagatatacatgtacaaaattatcaatttacaagataattgagtagcaagcagtacagttgtaaccgtcaccattttgatgctaagatagtgatcatctcatgtaaatgctacagtcacagcaagctagacttaagctagagggaaaatagagctccttataaggtgttctatgttttaaatcaaatatttatttagagtttgagtgtgtgattttgagtaggtttctggtggtttggtttgttttttaaaaaaaacttgatttaacaattcctttactaagtgataaatgagaatattcttccaaattctattttttatatatttgataaatactatagagttatcattatcagtataagcacataaagggaacctcagttaaaacttggaggaactatagaagtaaagggtatgtattccatagttaaagtaagcttcaggatttttattactccttcccagaagaaaaatgaattataaaaatacagcgactgaagcaattagtcaagagttagcataacataatggctacaaaattggactctggagccagacagcccatagtagaacctaggctccaccactctttgtgaccttgggcaaaatattaaacacctttttttccttcaaaatggaggaaattcctctcgtatgcaaaatggagataacaatagtacctatgtcatagatgtgagaatagaatgagttaatacatgtgactacataatgtctggtatgtaataagatctcaataaagcctcagtgtggtagttagggaaaagtcaaacctggagcacttggatgcatgcaaaatgtgtgacagaataaatattcaacattttgattttttttacaggtattcaacagtatgtggttgtacgtgaggagcaatgtatgacactgtacaccaaatgatccaaagggaattcaagacctctggagtgaggacacctccagaaggatgaaggtgtaagatgtatcaacatccaggcactgtccaatctgtctgtatggactggtactgactgcttggtgccattggaccacaggcaggaactaccaggcccaaaggagaggaaaacatggtaaagttcaacctgcttccctcaaacaacttacatttattttgcgctgtgaaagtttacaaatattttcattaattcattggaccaatggacattttattgagtatacaatgcaacagtcattgtgataagcatttaggatacaaaccaacaaaacacagtttcttccttcaaatgatatgttcataagataaaatggtaagtacaataaatgataatgggctaaagactgggatggtcttggtgttagaaagggcaagtaattaactcaatttacataccaggaacaagagttatacagatattgaaggacttggcctaagtttacatagctaattcttggcttttaattcctaactccaaacaaaaattcacatgtttattatattaatcttgcctgcttcaattaaaaacagaagtgggcacggtggctcacgcctgtaatcccagcactttgggaggccgaggcgggcggatcaccaggtcaggagatcaagaccatcctggctaacacggtgaaaccccgtctctactaaaaatacaaaaaattagccgggcatggtggcgggtgcctgtagtcccagcaactcgggaggctgaggcaggagaatggcgtgaacctgggaggccgagcttgcagtgagccaagatagtgccattgcactctagcctgggtgacagagcaagactctgtctcaaaaaaataaaaaaaaataaaacacagaagtacgtacctcctgaatgagtgacaacagtttttattgtttgatgaatgaaggaatgggaaacatccttagcttaaggaagtctctattaaagatgtatctcataggcctcaaagaaccactttcagtgtataggatctcacacttgacaactactaggcactcattgacataaatacccccataccaattttcccaacagttagtcaattgcggcactctctgaggcccccagaaaactgactcctcaaaatagtagcaaaggtagatgaactcacaggtgcttggtgctgaggagcagaggcatctgatgaggctaaaagtgggcaggagtgaaaaaaaggtgagtatgaaagacacctccagcaaacaaaactggctaacgttttgcttatagccatccttgttagcatcttcacactttataccacccaatgctgaggagagatgaatcagtcaaggaggcccccctcctcccatatgtacatgtttttacccattcatttcatgatttagtaaacaccaactataaaacattcaagttctatcataagcaaatcctaccctctaaaaactagtatacagtatgggaaataaaattacctatatcagttcagtaatttgcatccttagcctggaaagactgtcagggccaagggaaaagttctctgtggccctccgaagtttctctgagaagtcaactcacaaatgcaaattaattggagaaaaggcatacaaatttatataatctgtacacacgggagccctcagaatgaagacccaaagatacaggagaaagtgtccatttttatgctgaggttcaataaaatacggataactatttagaaatatgattgcacaaaaagagtatgatctcatgctaacagactgagcaggggatcccagcagggcctgtctgtctagattcttggcctctctgagcatgcattccctccttcttggtgtgaggcaacaccatctctggaatgagggtcttataacccatagtcaaagaaggtaggtcacataatttctttatgagtagtttttatatagaaaggcagagggaatgtgagtaatgattttaggtcttatgactggctttggggaaagggggttctggtgtctacgacctgccttggggaaaagcgattctagtttctatggctagcctaaggggagaattggactgagaaacaggagggcaagagaagatcagagaaacacttttgcttccaaggtcttcattttggggtatttgctgagtcccaacatcattccgactaaatctgttgaagcaaggttgagaagagccagcccacttatccttagtgcaaaaaactcccaagtgcaaaaatattacttatcacatagatcacgaaatcctcagagaaaaagtcttctctgttattagttccaaaagtaagtctatgtcctctaaataactggtttgtttcagctaatgaacacagtatattgcatagacgacccttctcacataggctactagagagctgagccaaatttatgctttgctgtgcttttttttactttacatctggctccacttctatactccaattttttttcttgatttatcttctgtcatttataataaatattacgtgttttgttggaacgtgtgtaaccttattctcttctaaattttttggcatgaaaatatcttcctaccttttggaatacccgcagaagctctgaggataaggaggccagaagactctgagatatgtccccattatttcctacaaaaggtggtgtctcatcacattgttcatatcgatgggtaactgatgtgatctcatccttttagccaaatttatagcattttacattttatagaatcaagagactatgtgaaaaatctgagacatgaagacaatttgtggaaactaaatgttctgcaggactttctaagcctagaacaggccctgattaaaatcttaaacacaacagtaaggagagttacagacttccaaacctcttccataatgtgtcaaaacaatttaagtgatagggaagaagatgatacaaggagactatttctcaaaatattatacatgctcatagaaaaagacatttgaaacaaagaatcttggacctgattaaaattaagagaattttagtaaaatttaagacatgaccagtgacatcggaattgtactcatttggaacctttggtaattaagtttatcattattgataataactgtaggggaaggcacatgattttagttgactgagtaaacccttataacagacacttaaaatgcagggagctgagagaaagaaaaaaagttcctttgtctctctctctaggctgcctcctgcaagaaaggaaggacaaaaagaagaggtaggatggaaggatattttccccacactttttgaaatactttacaaacactcctataatcatgtgatatatgttcctgaaaaacccccaaaattctgcaaaattattcaataaaaataacaagcttaagggaaaaatgggtttggtgaaccatcaaaacatatgtaactttgtaaccaagagtctaacaagtgggcggtgtggatcaggcctgaaatctcagcactttgggaggtcgagactggaggattgcttgagcccaggattgcaagaccagcctgggcaacacagagacaccccatttctacaaaaaataaaatataaaattagctagacatggtggtgcatgcctgtggtcccagctacttgggaggctgagatggaaggatagcttgggaccaggaggttgaggttgctgcgacccttgatcgggccaatgtattccagtctgggcgacagagcaagaccctgtctcaaaaaagtactaacaaaataatagcaattttaataaaacttgttaagaaatataaatttttaataaagaaacactgcagtaaatataaataaaaatagcctgatggaaggaaataaggaagacttatacaaagtaaaattcacaaagacagagagaaggcttaataaacatctctaagacagaatgagccaataggaagaagtagggtgctgcattcaattgcatcaatatattttgtgttcagcgactgttacctggtggtgctaacactacattctatagtgatgtcattccacttgccaattgacttcattatttttacggaaacacgcattgtaacgaaacattctgttctttgtgaaatttctagaaactaaataattcagaattccatttgggtttaaaaatcttttcagtgaaaattttctggaagggaagggaaggttataaccacactttagtatgcattaattttgttattttagtcaacaggaaagttaataggaagggagaatacaaattctgacctgtgtagagtgaaaggaaaatagttaagtacagttacctgcattcaaaaggtagtttgatagagggcattggggacaatagctgtttttccacagtcgcagggtgacataaaaacatcttggggccaaaaaaaagcctaaagtgagtgagagaagcatataaatgatgagtaggatccctatgcatactttctgcctacgtcacaatttcctcaggtaattttcttcttccttaaatcatgggcttataacagtattttgattgacataactgttgcgtattttgatatttgacattgtccttaacctcacttttcagcttaatttctaaatctatacaaggactttactatgtaagaactacttaatcctctcaaatttgtgaagaaaactttccactccccattattgcaagctgtgtgcagtttagtatgtggtgtggagtggtgtgactattaggctttctttttaacacttgcaactttgcttttggtaaaattattatgttatatattatatattaattacatatattaatatattaaaggtaatatgtttattataaaatttttctaagagcaaactatagagttttgactttaagttttataggatggtgaaaggattccagtccacaaatggttaaaacatttattttatgcattcattggcatcaaactttttaccagaaatctttattaaaagggcaaactgcttattttaatatgaacttctcactctaccatcatttatcatctggtgaaatta

SEQ ID NO: 93519 - DNA, 19384 bp, Homo sapiens
agggtggaaacctggggtgcttagtctaggagaaagaagattcaaaagggtctggcgcagtggcttacacctgtactctaagcattttggggggccagtgcagagggggaatcacttgaggccaggagttccagaccaggctgggcaagtgagaccccatctctaaaataaaaatcaaaaaactagctgggcatggtggcacgcacctgtggcccagctacttgggaggctaaggtgggaggattgcttgatcctgggaggtcgacgctgcagtgagccatgatcatgccactgcactgcagcctgggtgacagagtgagaccgtgtctcccaagaaaaaagaaaaaagaggaaaacccaaaaggaactgtcttcaaatatttaaagggatgcaatttatgaataaaagaaaaacttactttatattgctccctgtgatacaaccaggacccatgaaggggtagattcaattcagagaactttgaaagagagcacagtttgaatataaagtaaaattctctcagtccctgcactagggacatatggttcatagtggtatagatgaacactaataattatgtatttaatgtcattttataatttttcaggtttgatgtaaagttttccttagaaaaattaattttagaaaaataaattgtatttaaatactcatttgttagtatgagtattaaaatgttaagcaaataaacgatatacagatatggcaaaatcacagaggtggtactccttcaatgactgcagtgaaggaaacactgctgcagattgtgctatttcatcttcagtatttttaaacttctgttccaggatctatctcctgccaaggaaatgcctgtcgcatagttttgaatgactcaagtatttattaatagaaaggaagaggaagataagaaaagtaagacaaagaagggaaaagggatgaatgactcggtactccaagcacatcagttcagcttgtttacctgtagagttcacatcatagtgacattaaaccaggaggaattcagagcaccagtgccaaaaataattagaaaaggacccagaggggttaaaaataaggtcaggaagtagcagaatgaaacaactgagaaaatagaaacaaatatgtctactgacaaataatttgacacacaaatatccagtgggttggaaaaacctagacatcccagaaaagacctgctggcgatgctagtcttgctagaacctcaagagaaagataaaagtagcaaagacagcccaggtagctctgaagcataccccaaccccgttccttaacctctgagtgtgtgccgctcccacccaccaccagcccaatgcagcagcattctgtccacaagatgtttcaaatgtagggtctcaatactatttcaaattagtcatgaagaccaaaatgttcatcgtctcatgtttgaactttcaacgccctcccatcctagtaggcaatatgacccacacactgtcaaggtcattttcaggtaaacatcatcctttatctctatcgccagcagctgcccgcagggtctacagagcatctttagcacccacccccttccttccatcatgctggccaaggctaccttcactaagactcttcgcctatcatctggacctgctgctctgcagacctcccgtggccccttccagataacttcagtacacacagaaaagccttttggtggtgttctccatgccttcccctttctgggcgcttatacagtgatttcttataaaacaaaatgcctcctcacgaatgaaaccccttgtattagtctgttctcatgctgctaataaagacatacctgaggctgggtaatttataaaggaaagagatttaatggacttacagttccacatggctagggagtcctcacaatcatggcagaaggtgaatgaggagcaaaggcatgtcttacatggcagcaggcaaaagcttgtgctgaagaactcccatttataaaaccatcagatctcgtgagacttattcactaccacaagaacagtataggggtaactacccccatgatttagttatctccatctggccccacccttcatatgtggggattattacaattcaaggtgagatttgggtggggacacagccaaaccatatgacccctccaccagagtactacagccatctcacctacaatgttttcttctaaataaatttattcacctattacacagaaacagtttcatgaagttgaaataattttggttatgaagtcgaaagttcaaaactctattcttcattgttccattcactaattctgtgatcttggctgagttaactgctccctatttcaaagaattactgtgaagaaggtaatgtgtctactaaagaagattgtgtgcagtataaagctctctaaaaacataagtcactggccaggcatggtggctcatgcctgtaatcccagcactttgtgaggccgaggcgggcagctcacgagatcaggagttcatgaccagcctgactaatatggtgaaaccccatcactactaaaaatacaaaaattagccgggcattttggcgcgtgcctgtagtcccagctactcgggaggctgaggccggagaatcactcaaacccaagagatggaggttgcagtgagccgaggttgcaccactgcactccagtctagccgacagagtgagattctgtctcaaaaaataataataataaataaaaaaataagtcatttatttagcactcagttatttactgccttgtaatccttccgtttcatgtgtgttctcatatttccaaaattgcttttacagttgcatgaggctggctccttcccttgcaccttatttgtatcctttccagtgcttgagttggttgataactgagtcaactactttatgcccttcttgacccagtagcttcctcttgccttcatcatgaactcatcaatctcttctcctcctatagaagccttccttcatttactgaaagagcgctggtggtttttctaacatactaccccttatgcagagaaatgtgccattttgatatatgtatagtctgagaatagagttagtatagacagaacatgaaaacaataatggtggatccccagaaggctgagagatgatgacatcaaaatgtgtgcagagaaagactgccaaaacaacaaagaagaggtgtgacagggccaaaatctgtgttcatccaatgctgtccagcgcacaagttctccaaagtgctgtctgaatgtttggttaatgggtcagtatgaaaatttatatatcatgccttcattatttgaagctcttaagccttaggaacattaaattaacaaactggctctgatttcatccttgacaggagatatatacgtaagttttcaaagttgtattcatataatatggaattttgtggtgaaaccaacctcaacatcaggcctgcataatgttttatttctggtgtaaaaactggcttattcagcaatcacaagcaagtttgtaacagcataattttggcattttcaaatccattcatctctggatcacttgataagagtttctgtacttataatacaatggactagaaactatcacagtgattttatcaaaataatatcaccctagggggccctgcctaagcggtggtcagtcaacatccctgccaaagataaatcactctctttccacctcaaaacacagttataatgacttgggtttacacggctcaaattacagcaggtattctatgaattaattttaaaatgcatgttcctaagccatttgcttgtacagcctgaggagttaaaatatctcgtgtattcatagagacatgaacacatccactatggaaaacaaagacaaaccaaagactcttgttgctctgaaaccaaaaaaagtttgaggtctaaaggttctcaaacttaaacgtgtgtatgtgtcatgaggagatcctgtaaaagtacagattctgactcgggaagtctggggtggggcccaaaatgctgtgtttctaacaaatgcccaggtgatggtactgtggaaggtcccagatcccacttagagagcaaggccagagagcttaagcaacatagcagtgttcatgtcatataaacacagggactttgactttttaaacaattcagccagagaacaccaaagtaaaattatcaggaagtgatacaacacatcttacatacatttttgttctttactaggaattatgtttaaaagggaatactttctgcataatcattgctttttctactgtatccattcttactgagccatgagagtaggagtcgagcggttcctctcacaagttttacacagtaggctatgggctttgctcagccacccgaaaacacacatgccacagagcgggaaccagaagagcaggcagcaccctgagcaccctctctgaagctccacaagctaacagtgacaggaagggcactccacaaacatctcagctcattccctgcactttctggaaacacatcatgatcaaatggcataatgccccttcatccagatcttgccatgagtcttaaacagagcagaattgaaagtgaatggcttttaggatatacagccctcaattgcctccccatacctacccctaaaattcatgaccgttagcaacagcaaagttaggccccctgtgccaggcaacagccaggggagggaaataaagagaaaaaacgaagcaattagatgacgtgcccaagtagaggtgggttttgcagggtttgtttgttttcagggattttttttggtagaattgccttatttaactgttaaattactactttattatcgagttcaatttttgcttttttccctcttcttcttttgttctgattttaagatagtctcactctgtcacccaggctgcagtctacaaacacgactcactgcagcctcaacctcctgggatcaagcgatcctcccacctttgccacctgtataactgggaccacagccatgcaccaccacaaccagctaattaaatttcttttttagagacaggggtatcgctttcttgcccaagttggtcttgaactcatgggctcaagtgatcctcccatctaggcctcccaaagtgctgggattacaggcgtgagccaccatgcccggcctcagttttttccatctacaggttgtagtgcatcggtgaatgatgaaatcattttgataggtcagaactgggttgtttaaaaatgcaacaggtgggggtgcatcacagttcaaaggagaagtgttgtttctcagttgtgtgttgtttgtacccagttatgttgtaaagtgcactgctgactgggggtcatgagtagaaatttgaaaaacactggactatagtttgctctatgatagagaagggtttcttttaacaccttcactgtttttaacatatttattttgactgtattcacttggtatttgattgccttagctagatgaatcagggtaaatagcctttttcagatatttccctgctctttccactataaatttcctgaactcatatagcatgtttaacccatacatgtaatagtaacgtccttcagggtatacaccatatgagtaggtcacatttaatctacattctaaactattgctgagcatcgtactccatcctctgcatccaaacagttgctcaataaatacacagcttagcatggggaatgagccctccgtagctttcgagttacaagagcaccatcttctggcgaaatattttctttgtagggagaatgtcaaagacctaccaaaaatgtcctgatttttctagcaaaaattataattacatcacaaatactttgaaattctgtagagctccttgcttcattcaggagtttcgcttcatttcccctctgagaagtggtctttctgttccttagcagtgaaagcagtcagcctgtccttcctggttttccgttaaactaagccggtttcaagtttcagctcctccttgaattccaggctgctgagacttccctctagaatcctccaacatggagcctcttgcagcttacccgctaaaatgttccgggcccagagcaaaggtatttgcagttttgctgtctatagttctatgcacagtaacgctatttcttctacaactaaaattcctcaaacctaaaatcaacagcttttatgcctttgaagtgaaggatgcaaaaggaagaactgtttctctggaaaagtataaaggcaaagtaagttgcatcatctgatttttattgttatcatttttccttgtctctgtttattcctcttaataaaatcaattttttgctgttacatggtcataagttggaatttagtcttcagagtaatggtattagtacatcactttagttattacagttctgatagtttgcttctaaataataaattccgattatctcgttttctttaaaatgctttaattttgtgctgaattgacatgtaaagttgtttggaaaatacttatagttagtaatgtgaacatgatgacatttattaataaaagtattggttctataatctaataactttaaaaagaacttatcaaggatcatagttttatctttaatttaaaaataaactttcatgagtatctaatgcttttttaatggcagtactatttcagggccttaacccaggcatctaggttacagttttcaatagaactgtgtatgtccaaaaatatgaaaaaaacatcaatcagaggttatagtcccccscaaattgtttaggattttaactacttgcagaattttttaaaatcttttgcttcactttccggttggatttttttctttttccgggaggtttcactagttgtaaacgtggccagtgaytgccaactcacagacagaaattacttagggctgaaggaactgcacaaagagtttggaccatcccacttcagcgtgttggcttttccctgcaatcagtttggagaatcggagccccgcccaagcaaggaagtagaatcttttgcaagaaaaaactacggagtaactttccccatcttccacaagattaagattctaggatctgaaggagaacctgcatttagatttcttgttggtaaatatctgccttgcatatgctgttttaaattgcttttcatttttaaacaattataccaggacaatactttcctatttcatttgaaacgttgtatcgggaaagcttcataaaactatcatcaaagagccagaatctcatcctttgtaacttstaggagttatgctcccctgaaatcaatgttttagcttcttagatggtaaaagaattctattccaatatattttattccttattaccatcttcctgaagaatttacttaaagtgtgcccatggctattttcacaaaatatcttaattctcctctcttgtaactagcatctggagaaatgtcccttcccgtcattatagccacacagctctcatgaatagtgctgggcattattagttaacatatgtttgtggctaattttatgttgtctttcttatctgaaacaatattctcaaagatgaatatgtcagcttaccagatttttgctaaaatccaaaaacatataacttggttttttcagagggcagtagtgttaggctatttctccaattaagctagctacagaaatctgtttaaagacttgccaaggtcacttagcacaaaggtcatgaggcatacagacagcataggctttggcctcaagctacctgggttcaaacccctgctcttttgtttttgctatgtggcttcttaacttctctgtgcctgtttctcatttgtaaaatgggctatcaatagtaccgccttcttaagattgtttggaattaagtctgttaatagtaaaaataaagtacttatacactgcttgctctgtgccagacactgttytaaaccatattagtcaaaaaaaaaaaaaaaaaaaaaaaggccgggcgcggtggctcacgcctgtaatcccagcactttaggaggccgaggcaggcagatcacttaaggtcaggagttagagactagcctggccaatatggtgaaaccccatctctattaatagtacaaaaattagccaggtgtggtggtgggcacctgtaatcccagctattcaggaggctgaggcaggagaatcgcttgaacccagaggcagaggttgcagtgagctgaaatcgcgctactgcactccagcctgggcgacagagcaagcctgcatcttaaataaataaataaaggacattagctaatgttctctcatctaacttattctgatgacatcttcagtcctattttcactgtaaataagttgagttttgatcaaactattacctcactcaggcaatcaagcttctaatccaacaaaccaaatagtgatctataatatttcacataaatgtgaagtcagaatcttctaaaaacattatatttaatttctagggaaagttgatataatgcctaacgccataaatggcaaccacagtgaggtctttattcctcttattttgaaggtccactgaggaaagaaaagcccaagcacatgccattgaactaatcattcttcagttacagcagccagatacgtgggtgcaatagctcataggttatttctctttatcactacaaaccttctaaaacccttcttagcctgtgtaatcaaaaaggtaacagtgagttaaggtgtcattccacttagataggaaggatcatagagcccaaaggttaagagcatgagctctggagtaaaaggcccgtatatcaaycctggctcaaccactcattagccacgtgaccttgtgtctaggcttccatttatctcatctgcaaaacggggatgataataatacccacctcatagggtccctgtaagattaaaagagaggatcaatttgaagcacggagcrtacattaatctggcacatagtaagcacttcataaattttagttataattattatatttttcctcatgttagtcaataaaatgaacataaatcttgagtggtataaatagaaaaaaaatctacatttcttacataaattaagatttatcaaaaggatatcatggctgggcatggtagctcatgcatgtaatcccagcactttgggaggccaagacaggaggatcactttagtgcccaggagttcaagcccatcccgggcaacacagcgagaccctgccaaaaaaaaagttattgcttttcaaaataaggtgattattcactttgggaggccaaaaccctatctctactcaaaatacaaaaatttgcctggtgtggtggcacacacctgtaatcccagcaatttgggattacaactttgcttcattttttttggcttttaattttatttgacacagagtttcactcttgtcccccaggctggagggcagtggtgtggtctcagctcactgcaacctccacctcccaggttcaaatgattctactgtctcagcctcccgagtagctgggattacaggtgcacaccaccacacccggctaattttttgtatttttagtagagatggggtttcaccgtgttgggcaggctggtcttaaactcctgatcttaggtgatccacccgcctcagcctcccaaagtgctgggattacagactgagccacggctcccagcctactttgcttcatttcttgatactaagatcacatactagatgagtagactcataggtgaagtcatcaagtatattgaaatctggttactctaaccttgagtttcacttcgtttgggtgttttgttttttatattatgacagtcctagaacttgatactaaagttatcatttatgcagatactaatagaagtgaaaatcttgacaaagaataaaattatgctcatgaaaatatgttctggatattttagattcttcaaagaaggaaccaaggtggaatttttggaagtatcttgtcaaccctgagggtcaagttgtgaagttctggargccagaggagcccattgaagtcatcaggcctgacatagcagctctggttagacaagtgatcataaaaaagaaagaggatctatgagaatgccattgcrtttctaatagaacagagaaatgtctccatgagggtttggtctcattttaaacattttttttttggagacagtgtctcactctgtcacccaggctggagtgcagtagygcgttctcagctcattgcaacctctgcctttttaaacatgctattaaatgtggcaatgaaggatttttttttaatgttatcttgctattaagtggtaatgaatgttcccaggatgaggatgttacccaaagcaaaaatcaagagtagccaaagaatcaacatgaaatatattaactacttcctctgaccatactaaagaattcagaatacacagtgaccaatgtgcctcaatatcttattgttcaacttgacattttctaggactgtacttgatgaaaatgccaacacactagaccactctttggattcaagagcactgtgtatgactgaaatttctggaataactgtaaatggttatgttaatggaataaaacacaaatgttgaaaaatgtaaaatatatatacatagattcaaatccttatatatgtrtgcttgttttgtgtacaggattttgttttttctttttaagtacaggttcctagtgttttactataactgtcactatgtatgtaactgacatatataaatagtcatttataaatgaccgtattataacatttgaaaaagtcttcatcattttcagtatttctctctgcattattttttagaagcaactcaaattctgtaatcataatattaccaagtaagtcagtctttatttttgcgtgaaaatcccaagtgtagaaaaaaggacatgagtataagatcatttaacttgattccttataggctgatttgggttgctaatgtattcgtactagattagccacttgggaggaattcaatgctgcatcattctgatagctgaaatagtaaaagtcaactccaaacagcctaaattctagtataaaaagggggtgatcatacaagtcctaaagtgtagatcagcagtcactgaacctcttagagtcacaaggcatttcttctcccaaagtcatgacctttatattttgttagccttataattgactaacaaagcaacctgccaagttggtgaaggttaattattgcctcatgaaatatacattcatcgcataaaagaattaaataggaagatggccaaaaatgtaaaaaagtcgtataaatttgtctaagaagaaaaagacccaatttaagtagtctgtgacttgactcccaaattctgacctgatggatgaaagtgaagatgtttcgtatggcaaattcagtaatgctacctcagtatatagttctgtatacgtatttggaccaaagttattagataaaccaaaaatatttcatgaagcatcttctgcttcagagtccatatccagccacccagctatgaatgtatttagaaagatatttggtggaggtggaatttctaccagaggtcaagaggatttgtagggatagcctcaagaatgccagatgagtgtgtcagaaagcctgctcctacctctcgccagctgcgtgactttaggcaagtcacttaagtaccttatttcagtttcctcacctgtaaattgaacaggggttgaatggaataaaaagccctttgcaactctaaaagtcaattaacacacttactaaggtgttttaagtgaccaggaaggaaatcagaactaacctggattgttagcgaagaaaacagaagccaccaacaagcctatctgtcctttgcaattttgctccaagagcctattagcaatttgaattctgagcctctaagaaaacttatgctcaggtggcccctccaagtgttggtgccagagcactcttgccttgtatcctcacctacgccttccatgaactcatagcagtgctgtggcactgcaggggtgttttatgcattcacgttaggrgcatgagcagaactgcatatgccagcaccacatgggcagcagagactccccactgccagatggatgataatggagctgcactgggaacaaccaggactgtcccagtcaacatgatacagatgaacatcctgccttaagtcactagctctctccaaagccagataaagtgggtttcttcacttacatctctctaatcttggctgccttattcaacctacagactctatgtcagtgctggattttctccccttgccctttaggtaagcagagtaggcaggaggagatttgaaagcgtgtcatacatattgccttgaaagaaaggacattcaggtgtcccttcggggttctgtaacaattaggctatgtgtgctgagagagggagcggagtcatttgctgatgtgctgctacctgtaactcaaatgcctcataggaataccagcggacaaacacatagaggaaaagttgaatctttcctatattggacaatcytccttcagtcttgtttctgcatcaaaaagtctgggacacagagtgctacaggatgcctgggctaaggactgtaacagaaaaatatcaacatcagagcctggcacagtggctcacaccggtaatcccagcactttgggaggccgaggcgggtggatcacttcaggtcaggagttcgagaccatcctggccaacatggtgaaacccccatctctactaaaaatacaaaaattagccgggcacggtggcacatgcctgtaatcccagctacytgggaggctgagtcagaagaatcacttgaaaacaggaggctgaggttgcaatgagccaagattgcaccactgcactccaacctgggcaacagagcgagaccccatcttaaagaccctgtctcaaaaaagagagaaaaagaaaaagaaaaatatcaggcatcacatgaaagagtattcagctgtcrttcttgtgaaaaaggaaaaggacaaaatcaaatgcattttaactgtggtaactaattcactgacttgaagtttgctttgtttgttttctttggtgcgtagagaagaatacttcatactaactcctgatcatcttacagcagacataacaacagagtgttagagactggaataaatatgaatttggctgaaatgtgccctgaaagttgtatttcatttttttaaatgtttaacaattacactgtatcaatagtatatatacgtgtacatatatataattcttaataactgcagtgtatctagcatatatataatggtggctggtacatgtttaatagcagactctggaggaggaatcctgacatacagcatttgccagctcaatgtaaatgctcatgctccctcatggtcaatttcaatctaccactggtttagtaactaggatgcaaaatttctaaaaatgtgataattggtgatgggcatgatggctcaggcctgtaatatcagcactttaagcagctgaggtgggaggatcacttgagcccaggagttagagaccagcctggggcaacatggcaaaaccctgtctccacaaaaaaaatcaaaaaattagctgggtgtagtggcacatgcctcaggtcccagctacataggaggctgaggtggaaggattgcttgagcccaaagaggtcaaggctgcagtgagccgacatggctccactgaactccaggctgggcaacagagcgagaccccatctctacaaaaaaaatttttaaattagccaggtgcggtagcacacacctgtggttccagctactcaggaggctgaggtgagaggattgcttaagcccaggaggtagaggctgtagtgagccatgattgcaccacattgatttgtggtgttcctttgaaagaaaaatgacatgtttgggtggagctgatatgaggacactctatccatatttagtcctctgcttgattttatctttcccatcaaataaaattctaataattgttaggcctagaaactaatccaccacactccttcccactcttcccttcccctcatccagctgaactgttaaggctgtctcttgcagagcagtgcaggggaataaaaagcagcagagagagagaaattaggaagctatcactataatagtgacaggttcagagggcagcgatgggaagtagtgacattcccagcaccagtgaacagccaagagactgccccaagagaaaacacctgggagaaaatactttgccatcagcagaacctccctcctctttttaccatcccttttccctctgcttgacccttgacatcccagtgtgtatccctttctttccctctcccacctatggaaacattttctcttttaatttgtatcttcactttcctcctaacccattcatctctttaacatattttttatttctttaacatatttttatttcattccattccttccctcttttctcatcatctcgataatatgagactaaaccacaactttaaatgtcttctgtttattgaatataaagttggtttccctacagaatcaaaagttctaaaaaagaaaacttaaaaaaatttaagttggcattttcagaaacagaaaatcaattacggcatgttcctcacttctaagtgggagctaaacaatgggtacacatggacatgaagatggaaacagtagacactggggactccagaaggggtagaaggaaggaatacaaggactgaaaaactatctattgggtacaatgttcactatttgggtgataggttcactagaagcccaaaccccagcatcgcctattatatttatgtaacaaacctgcacatgtaccccctggatctaaaataaaataaagttggcattttatatcttgctctttaatttaaaaaaactaacacacaaaagccaaagcttctaaatttagtaggttttatttttatcactaggtcagtgattctttatagaaaataacatgttgaaatttaaccttaaaaaaagacaagatgaaaataatatttacatggaagatatacttaaacataaatctcctgaaagtgaataacactgggcaacatcaaaaagaggatgtgatttgaaagtagtaaaatgcgtaagaatcaaattatagatatctatttaacccatgttctagaaatatgtttaaataaggaaagcataaaaattattttaccaataacttataatccagtacagtagagaatgcgaaatatttcttatatctcatctatggcttaactaactgatggcaccaccaaagtcagttccactgactggctgcaaatgtccgcacaagaatactgcatgtctggaagccagcacatatctatgctacttcgtgggtcaaaatgcctccaaggtaatgagaatatatttaaggtcatattgtatggtcagttcttcccacttcacaagttgttagatctcatgctgtcttccaaatatttcatgaacctgtgattttacagaaaatgaagtgaaaggattgaggtagatcttccaaaaaaatgtaaaccatcccccacccaaaaaaaatccccaatattcttgatatttcaagtgaaaaatgttttagttgactgactcatctggaaaattacctcaactttcccttcagttggtacacacacagtcatggctatagaaaccaattctaatgctgtatttagaaactaatgatgcagaggccgggcgcagtggctcacgcctgtaatcccagcactttgggaggccgaggcgggtggatcacgaggtcaggagatcgagaccatcccagctaacacggtgaaaccccgtctctactaaaaatacaaaaaaattagccgggcatggtagcaggcgcctgtagtcccagctactccagaggctgaggcaggagaatggcgtgaacccgggaggcggagcttgcagtgagccgagatcgcgccactgtactccagcctgggcgacaaagcgagactccgtctcaaaaaaaaaaaagaaagaaactaataatgcagaaagaatcctaaagacttcactgaaaatttggggacacattgtaggtccattccacattgttattacattctaaaccttatagttaaaaacatgtaatttcataaatacttaaacactgtctactccgaaagactccaaagactccaaaaatatttcttaaaaatttttagttatggaaaagcaggcataagtaaatttttcttaaaaggaaaaaatttaagtaattgtaatactttccttaccattataaaactgtgcattgtaagtattactgtattataagctaatggcaataatatattatggtaaatagtggcttgcttcatagcagaaagtacacataaacacacactaattacagattcagttacactctgatgttcattgtatatgcaataagacagcagttgcatgttagccgatgccattcacatattcaaccagctaacaatacactgccagctcatcacacacaggtatccagagcacttcattgacaagaagaatttatccagaagcaagtggcagggtagttgtggctgctgacttgacccaagcagccagctaacaatacactgcctacctgattcaggtcactgccgattctcgtggcccaggcagtcactgaggctaaatttgtaacatgaaacatagtggcagaactctaatcttaatagtcacattaaagaaaacttatacacaaaatgtattacttcaagactataagaaataaaatcaatatttgcttgaatctagtcaaaaacataaaagttaaacaaaaactttaaaactttcagaatacttacatttaggttttccaaattaaatgcttggataaaaatatgttctacagtacaaatgaattttaaaagttacttaactgtaggctgggcgcagtggcttatgcctgtaatgccagcactttgggaggccaaggttggctgatcccctaaggtcacaagttcaagaccagcctggccaacatggtgaaaccccgtctctattaaaaatacaaaaattagcccagcgtggtggtgctgcctgtaatcccagctactcaggaggctgagacatgagaatcacttgaacccgggagctggagtttgcagtgagccgagattgcaccactgcactccaacctgggcaacaaagtgagactctgtctcaaaaaaataaataaaaagttacttaactatagcttttcaaatcacttctgtttactgatccaaagactacttgtctgtattagacagtaaaatatctaggagtcgtgataatacataagctgtgcacgacacaaaactgcagcagtgtttgggggaaaaaatcaacattaaagtatttaagaaatgtaagggcttaaatgcaattagttttctcctactagaaatgacattagtaatcgagttctgaaaatgcaattatgtattcaatataggatgttaccacttgaatactgaatttttttttttaagaggcagggtctggctctgtcctccaggctggagtgcagttgtgcaatcatagctcactgcagccttgaacgcctgggctcaagcaatcctcctgcctcaggctcccaagtagctgggactacaggcacatgtcatcatgcccagctaatttttgcagtttttttataaagacaaggtctccctgtgttgtccaggctggtcttgaagtcttggcctcaagtgatcctcctgcctcagcatcccaaagtgccgggattacaggcatgagccacagtgcctagttgcaaaatttatataagatctagaaaaatctattaaaatggtggtggatttggaactagaatctctgcgtacaggtcaaaggaagatgaactattgagcctagagagaagcatggtaaatggtgacagagatttaaagcagatgaaggctctttatgaaacacgtttataaaaccatttaaatttgtttccttttacactgattacaggagacactaaagacctttgggtttggtctttcaaggagaacaggtactacattggatcaactttaaattgctcacgttaagaaccatggtttatgccacttctccacattgtccacaagatggcaccatttccatttctttggggggcgtgcttctgaatgcaacagagaggagtgcaactagcwactgttaaaatcattaacagccgctagcaatacactgcctacctgacacatcccagctttatcctttgctgtggaggcagaaactagaaagtacgattcagatgcaaacgattgcattatttgtctgggatcttcagtttcataaagaaattttttttagtatgtaataagatactaaaattctcatattttcagaccagctcaaacttcctacaaatacattatttaccaagaattcgtttgttcaagatcagaattaaaacagagaacaagaacaagccctggactcacgttggcggaatcttgacttctcttctgcttcaagtctttggagagcacacgcatgatactttcctttgaaaacacagataacatattgagggagaaactatttaggaaaatcataatttcaggtgtggaatttttctagatcttgtgcttgtcagattacactttttttttttttttttttggcaactaggcaccttcagaatataactaaattacatcactcaaatttacgaccagggcttagagtttcgtaccacctcttggtcctaaacagatattatgaacggggccttcggccccgcattagagagttagggagaatgcagaaaagggtgttactcacccacagcatctcctyttccgtgcggaccctccgaggcgcggkgcgctccagtttccactccatctccggctgacttcgccctgcctggcgtttggcctctctgctcgactgcctctggttttcttcccaggtctaagtcagtcttgacgcctaatygtcaaacccctggagtcccgtcccccaggaccattctatttcaccacctccctccaggtcccccactcctcccaccgccgctgcaaggtgttccccagggtaccatttaaaaagccggcggggcggcagtcggcgcgggaatccccctcgccggcttcttattggccggcgccgcggtgtcgtcagagcccgggtgggattccccggcgcgcgccgcggccccgcccctgccggccctctctgggccccgccccgccaccgcctccggccgaggcgcgcacccgggcgccaagctttgccgcgagccgtggcgggcctgcggctgggcctggcgccgggggctgccaccgcggcaggaggcggaggggttggcgggcgaagaagcgggttctgggagttcacgatctttccattttcagaaacaagaatgtttccttataacggccctgatccctgttcctctgcacccacttctctttctcca

SEQ ID NO: 93520 - DNA, 12722 bp, Homo sapiens
  misc_feature (1)...(12722): n = A,T,C or G
cctgtttggaggcctaagtgtaaagaaagccctttgtcattgctcagaaatggggagtccatgacaattgttgtgcaagagcattcaacactcacccaggtagaaatgggtagatggggatgttgccctttaatcacttcttgctcaacatcatgtaggttataatcaacaccgttctaggcactggagatgcaacaaaaggcagtgttcctagccccaagaagcttatagtctggtgagggagtcagacaattctggaaccatgtgactagtgctatgatagaggtatgcaggcagggggtggttgccatgggatcacagagaaaggttacttaatccagaaaagttcaaagcatttaaagttttgttaagtagcatacaattttttgaaagttgattactccaaaataatctgggaactttctctaagatattttgtagttctatattaaaatatatacatatatatgtaaatatatttataaaataatgaataagttttgtactatgtttgttaaggtagcattttgttattattcaatttcattaacctttaaaatgtgagatctatcaggaggcagtcagggaagttttcctacgaagatcttaccaaagctgagacctacagaacaagtgtcagtaagccagagaaagccaagaaggggagagggtgtgttctgtaaagggaaacagcacatacaaaggctgggagaggtagggcgtggtggctcatgcctgtaatcccagcactttgggaagccaaggtgggtgcatcacctgaggtcaggagtttgagaccagcttggccaacatcgtgaaaccctgtctctactaaaaatacaaaaattagctggcgtggtggtgcatgcctttaattccagctactcaggaggcagaggcaggagaattacttgaacctgggaggcggaggttgcagtgagctgagatggtgccattgcactctagcctgggtgacagagcaagactccatcgcaaaaaaaaaaaaaaaaaaaaaggctgggagacaagaagcaatgggttgggaaagctgggctagtgcttcccaacctgcattgaagagggaagcctagaagtaggatggaagggggtagaagagtaagcaggagtatgacagtggagaaccttatatgttcaacaaggagtccaggctttatcctgaagccaatggaagaagaggggataataaaggcctttgaacaggactgagacaagattagatttttggagggtgaattggaagaaaaagactggaggcaggaagaccaaggggacgctgatgtaataaaccagggaagagaagatggcagtgtgaacttaggcaaaggtcgtggagaactgaaagagatgatggactagacagttacttggactggatttagtgactggccaatgaggggatgagaaagaggggagaatcctattccaccttggccacagcctgtgggtccaggatgttttgtaggtagaaatgagttttagatatatgagtctaattatacatattttaggtaaatttgctgtagagaccaagatagcttttcctttcaaatctctactgcatgaaatcaccttctagcttagacatcttaaaatgcaaatctcaggaggcttacttcctcagggaggtacatctgttctttctaccaattggcgtgggttttggaccttgttatttttgaatcagttacagtctccctgccagctgagggcacataacgtttcattactggcaatactggagtcaaggagcactgcctatcctaactctaagtctggagttagagcccgttgagtctgtggtagttccttttgcttttgatatttagttagcaggaaaactragaggatattgaatttcattaacacttccttagaagcacatttccttagaagcatgaatattgcttggattctgaacactctgaatcttcaccaagagaagaaacaaaatgccgtggcaaaacggtaggagttgtctttggttctcctttagctccagtccatttcttgacataaacttcctccatccttgcagacctaccccccatttggtatctgttgaccttcattgtgccctaagctgccttcccctccccttttcttgagaattttacatattttgcctttccacgttgaactatgtatatccccttcctcgtcggcactccccaccataattgtgctgttgtatttcatccataagacagacactctgccctattccagctcttaaaccctagtgtgcttcagaatcactggagatgcttattaaactcctgggccactcgtcctgtatctctgaatcaggaaagctgggccagggcctaggaatctgcattttaacagaaggtaccctcccctgctccaggtgattctgacttggtaaggagaccactctttgagcaaccccacagtctgctgtagcagagcagccctgctttttggacaggagacctgggtttagttccagtgatgccctccaccagtcctgtggctttggggaagtcacttcaactccctgggcttctatttcctcatctaaatcctggagaagctgggagatacattacactggagacctaaactcccttgccccatggccttcccttctttcctggctggaaaaccccaaatctggatggctctacactctgccttctctttcctgcacccaggctactaaatgtgctgagagaaagtcacaggcccaggccaatggtgctgctcagactagctttcaacatcatgcaaaggatcatggccctcctcctgtcagcaacctctctcctgcattaccaaatgctcttctttctcctcaaatgtcaggcccagccattcctcctgcatcttaacatgtgaacttacctttcaacctacagtgaaagtagaagccacaacaggaaatcccttaacttcctaccacacacctgcaaatgcaccagcttccatacctgtcctttcctgcttccttctattgcattgtctctcctctgggatatatcatttttatctcagatgctcgggatcttgctctttcaggttcctctgtctctcctgtatcttccacctcttcccctcttcagttatattcctaccacccagagatttgtgctgttaacatattgatataatcctttcaggtttttaaaaagtatgtgtaagagtacattttattatacctcattggaatttttatcaattaaagttcaaaatgaagtagggggagcagagttactatgttataggacttataggaattcggccttacaattgtgggaggagagaaatgaaggcccaagacgagaaaattggaggaagagagcagtcattttcagtcatctgagaagccaagtgtttcctcctggattatccaggtgggtccaatgtgacaacaagcgtccttataagagggaggcagaaggatgtgactacagtagtaggaaatatgatgacaactggagccacgcgagggtggggacctgagcaacacatgcaggtggcctccacaacttagaaaaagcaagggaatgaattctcccctagagcctccagaagataccaaccctgctgacaccttgccgttagcccagagaaactgatttcagacatctggactccagaactgtaagaaaataagtttgcattgttttaagccactaagtttgtggtatttttttgtaagaggcctaggaaacaaatgcacatatccagacacaaagggagaccaccaagggagcatctctggagaagtctgttgaaagctgctgcctctgtagttatgtgctctagggatctgcaggcagctggtgctgggcctgggaccactgttggttggtcagcgggctagaaacaagaggacctggacacagagcggagaactggaccccactagacactcctttgtctgtccttactacatctgaccgtaaatacctgcagaaagcaatggccactttgtcacctctaaatttcacacaagctcctcttgagccagctttagcccatatagggaacagaactctgggacctatagtttccaccttaaccaagttgacacagcacattccaatataggatcgtatggttttattggtttcccaacatactgaacattatggtaagagcagtttgctatatcatgggatattcttccaaactaatttagaagaaattctgatgaaccattatttatttaactttccttctattattgttaactcaggatgttttctgtttttctctatcacagacagtgctgcagcaactctctgtgcatacaaatatttgtcagtatctctgacatttcctgggaatggattcctagaaaggagattactaaattaaaggaagtgaatttctacggagcttgatgattcctgccaaactgctttccagaagtgatgtatcagttttcattcctattaacattgggctcaggccagcattgaatattatattttaaatcttttcaaagagacatttcttgactatctctgatactggtgatcattactggctcaggaattggatgtaaagtgagctagctggactggtgacaccttccctttacctccatgggttcctacaccttcagaagctgcacccttgatgaaaggggacaacatgttctggtgaggaatctagcatccttcagtcaagagcttgggggaagtatgttgcttaaaaattaaatacatcctgagtaaacacgttacgcacaagaaaaagtactgttcctatatcagaaatatagaaacggaaatagaaagcaagtgactttcccaggtatagctagcaagtccctagcagggtcacacttagcatttactttcctaaaattttccatcatgatttaagacatttcaaagcatctatattgtgccaaaaattagattctgcatcacacataggaaagcacaatttttggcttatttcttaaatactaaatcacattaattggctgtttcccattgcaaatatttgaattaataaggatctttttatcacatgtaattttaaatgatcttttagtttttcagctttgctgcaacacagatggaactaaaacaaaattgtataatgctgaagtgacccaaggagaaaacctctcacataattttgtgcagagagtgagtaagcagtctatgccacatcttccccaaatttatattttagctgaaatgtaatggttagacagatagtcagtaattggtacagtgagaagagaaattagttctgacttatcttctctccaaactgcaaagtgtatttttatatacaatttcagaatgataataaaatgatctagtttccatttatcaaaatgagcgatgctgaatgtctgatgactggcttgctttctgaaatcttattttagagttatcagactgtctgagatctttgggaaacttctgcattaagtgagccaattggcaaataaacatctacttaacatgtacaaaactatacaaggctgagatacagaggatgtggcagagatgatcagtggtcatctcagaatggtctctgaaccagcagcatcagcagcaccttggaactgatcagaaatgcttaccttacacatattggatcagaaactctatggagaggctgggcagttgtgttttaacaagccccatgatgtacgctaaagttatctaagaactctgatcccaagaaacaacttaaaatacacacacacacaggagtcagctctggaaaagaggaaatattgtgtcattagcatatcagaaaatttgaagaagccctgaaagagcaaagctgatgtgttcacattcgcagaggaaaccatagcccaaataatgtagaaaaaaaatatattagtaagggaatgagaatgttttaggaggaactccagaataggagaatactaaaaatggcaggggcaaaaaaagaaaaaaaaatcaaagaaataatataagaaaaattcccagcggaagccacagacgccaggagccctgtactctcagccatggtgaatcccaccgtgttcttccacattcyagtggacagcgagcccttgggccgcgtctccttcaagctgtttgcagacaagtttccaaagacagcagaaaactttcgtgctctgagcactggagagaaaggatttggttataagtgttcttgccttcacagaattattccagggtttatatgtcagggtgatggcttcacacgccataatggcactggtggcaagtccgtctacggggagaaatttgatgatgagaacttcattctaaagcatacaggtcctggcatcttgtccctggcaaatgctggacccaacacaaacggctcccggtttttcatctgcactgccaagactgggtggttggatggcacgcatgtggtctttggcaaggcgaaagaaggcataaatattctggaggccatggagcgcttgggtccaggaatggaaagaccagcaagaagatcaccatttctgactgtggacaactctaataaatttgacttgtgttttatcttaaccaccagaccattccttctgtagctcaggagagcagccctccaccccatttgctcgcagtatcctagaatctttgtgctcttgctgcagttccctttgggttccatgttttccttgttcccttccatgactagctggattgcagagttgaattaagtttatgattakgaaataaaaactaaataacaaaaagaaagaaaaattcccagagctgaacaatgacacgttttcagattaacagttcccacaaaatgctaagcaggttggaatagacacatcttgatgaaatatcagacactaaggatgaagagaaagtttctagagagagaggagaaaaaagaggttacttaaacaggagaatcagtttggcatcagaattctcatcagaaacgctgaagactaacaggcactaaggaatcacttcaaaaatttatgaaaaatattttgaaaaaagtattgggttcctggaaaaactaacattcaagttagagggcaacaagaaaatgacagttttaagcgcaagaaagtcttgttgcattaaagaatttatgaaggggttaaagtttaaaaatattgagccagttgggaaacagtattttagtttgagagaaagaaatatttggatttctgtcagaataattcccaagagaacatttaagaaaattacacattttaaaaaacaaaagcaagaataaaagagagagagagaaagaggaagaggacggaaggagggaaagggagggagggaggaaggaagaaagtaaggaaggaaagggaacgaaagggaaggaaagaaggaagggaaggagggagggaggagaggaaggaggagaggaannnnnnnnnnnnnnnnnnnnnnnnnnnnnnnnnnnnnnnttaggaacaagttcagatttagcagcttagttaagtggcagagaaaagctattaccctctcatatccatttagtggcttatgtgaaatgaactggttttgaagtccagtttcttccacttggaattttgggttttacatgcacagcaagtgtggctagtactgcatcccttgtcctcccttccatggcaagggcaaagggcaaaaaacagatggacttccctaaagattcatcattgtcaccagaagaatagctgggtttcctataagagactagatgccgtcttccttcatttatgcaactgggggacaggaaaggtattgtttgtcctgtgcatcagtagagcactggtttccttgcatatccatatagaacagctggttgtactcactttgtctcccttattccagcatacagagagtgtacaactcagccattcagtgacagtagttttttgaccctgaaatatgtaaacagaaggatggtccaaaggaatcacgaagtaatcctctcataaaagtagtaatagctagctttgtgtacagacagatttcacataattctgatgcaagcttcacaaacagtcccatgaggtgagaaagaaatataatcattatatatttttttacagaagagtaattttaggctcagaggattaaataaaacattcaagaacatgcagcaagttagtcagtctgtctcacttagtgaggactttctgtgtgtcagaacttgctgttctgaacacgtcttttaaaaagggaggtaagtccctcaatggggaatgtattggctagcagaggcagatgggtggtaaacatgtaaggacattagccataaagataactttagatatgggagattgccatgaagaggataaagtaagtcaagtcacaggggatgacttgagctacggtgggagaggggctgctgcttcagcgtgggtggagttggggaaattctctggattgagacctgaatgttgagaggaaggcataagaggattggagaaagagcaacccttgcagaggaacaaaccccttgagacagcaatgaacttggcatgtacaaggggtacaaaaacagaccagtgtagctggaacgcagtgaacaaagacaaggctggtaggagacagggtccaagaggtaggaagaagccaatcatgtagaactttgtgagctataaggagtttcggttcgggttttattctaagtgtaatgagaagttttgtttatttgttttcttaaacatctttactaaggtatatttttacatcataaaattcaactgttttgagtgtgcaattcaatgatttttataattgaattaattaatttataattataattatatattaattataattcaggagagcaaccatcaacataaatcagttttagaacattcttattcttccaataagatccctcagcccactgacagttattcctttttccatgcaactgctagtctacattctgcctctctaaatttgtcttttctgggcatttctataaatagaatcatacaatatatggactctggtgcctggcttctttcaccaggcataatgtttttgaggttaggtaggatatgttagtagtctgctgttttttattgctgaacagtgttccattgtatggatatgccacaatttgtttatccatttatctgttgatgaacaggtaggttgtttccagtttttgactgttgtgaataatgaatgctgctatgaacagttgtgtacaagtctttatgtggacatgttttctttcattcctcttgaatacatacctataagtggaattgctgggctatataggaatttcagacattgccaaactgttttccaaagtgactgcaccattttatattctcaccaggaatgtacgaagcttctcatttctcaactcaccaacattttttgttgtctgtcttatttatggtaaccattctagtgggtatgcaactatatctcattgtggactgaatttgcatttccttaatagtcgactaatgatgttgatcatcttttcacgtcctccattaccaatggaagagttgtaagcaagggaaaagatatgatatgatttgtgctttgaagaccaatctggttactaaatggcaagtagactatgggcagttggccagttaggagatgattgctataatccagagggagataatagtgtctcagacttgggttataataatggaggtgaagagaaggagtttgaatagagatacattatgaaggtagagacagtggaagtggctaatggattggatatgggatgtggggaagagtggtatttaggcaaacaactaggtaggtagtggtgccatttttttgccaaggggaagcctgatggaggagtaaatatggtggtgatactggggagttggtcctaaacaatacctattttgatcacactacatttttggcatctattagacatccaagaggaaatgttgaatatgtaatcaggagctcaggggagagttctgagcgagagatagaaatttgagtcatcagcatatagagggaatttaaagctttaggacccagggagagtgtgtggataaaagagaatggagtggagaatgaaaccccagaggcattttgaaaaagttgcttatggagatcagagggtaaggaggaaaatttgaaaattaggattgaggtaaagttacgctaagggaagcatcaagaaatatgttcattgactgtactgtccatgacgtagccactaacccatgtggttcagtgagcacttgaaatgtggcttgttgaattgagatgtaagtacaaaatacatattgaatttggaatacttagacaaaaacagaaaagtctcagtaataattgttgaaatgatattttagatatactgggttcaataaactgttattaaaattaatttcacctatttgtgcttttaaaaatgtggatactagaacatttaaaattgcatatgtggctcatatcatatatatatttttggggggcagtactagtctataatgttctacccacagtctcatcctggttttccagaaatgtgactgtggcactttaaggcctgtgtaggaactttaatttatataagaattctgtatttccccccttctcactactgcacttgactattaaaaaaatgttttaaaataattctgtagatatttgctacaaagctttcttaaggtgctactaggcatagatgacatccacaacctaaaagaagagtgtcagtgccttgggtattttgagtatgtgtttacattgtgcagacagagcaatattttagcaaagacaaggccacatggatcatttgatctttgttgagctgggaaactgcagttaaaatggagatactggccgggcgtggtggttcacgcctgtaatcccagcactttgggagggcgaggtgggcggatcacttgaggtcaggagttcgacaccagcctggccaacatggtgaatccccatctctactaaaaatacaaaaattagctgggtgtggtggtacgcacctgtaatcccagctactcgggaggctgagtcatgagaatcacttgaacctgggaggtggaggttgtagttagccgagatcgcaccattgcattccagcctgggcaaaaagagtgaaactctgtctcaaaaaaaaaaaaaaaaaatggagataccatatccttgatatttgtaagaccaacatgtccttgctggctacaaaaaagttcaatcaaataaattctttcttccatctggttaaatacaacttgattacatgaagagaaacttaattgtttaataaggtcaccatatgaattagaaatgatttttttcttttctttatcatctttgagattctttacatacaataaaaatcagtttttcatcaagttcttgtcctattgctattatggcaagagtttccctttagaaataagaagaattccctttggctggaaatcatagaggcaaactgtgcagatataaggtggtgagacttcttcactctcttccctcgccccagtgaatgaggtcatttgaacaaagtaattccctcaaaggggtagagttacactgtttttgtgttttacatgacagatgattgggcagatttcatgcataaccctgtgggagattttgcagtcacaatatagaaatttctctagtgcttctgattaaaatacagaatcaagagctatagtaacagctcatccattcagttcaatggaggattggaggctgagttttgcatagagttttgtatgagttttgtataggctgaggttgttagaaaatgggagctagggccaggcacagtggctcacacctataatctcaccactttgggaggccaaggcagaaggattgcttgagccctcgagttcaagaccagattgggcaacatagtgagaccctgtttctacaagaaatatttaaaaattagctggttatggtggcacacacctgtagtctcagctacatgggaggctgaagcaggaagctcacctgagcccaggaggtcaaggctgcagtaatctgtgattgtgccattgcactccagccttggtgacagagcgagaccctgtctcaaaaaaaaaaagaaaaaaaaaaagaaaaaagtgaaaaaaaagagtgttagaaaatattattaatctgtcatattgatccaggtttccaggtggtcatttctataaggctagatcctgcctgtcctacatgtggaagttctctgagattttacagtaccttcctcagacaaacttttggaagaagtatgacttttctggatgtagaatacaaaaattgttcatttactgctttggttccatgtatgatgaccttttccattttagttttctatagcccttttagagttctactttctgttaatatttgtaactgctcttaatattctattattttgtgtgttatataaacacagttaacataaggaggagagagttcaaatttctatcacttaatttttgaagatcttgaaaagagatggttcttttatttagttcaggactgaaggtagggggtttttaaaaacatgctgctgggctcctgagagtaagccttatgtcagcaacccctttatatgttcgatacattttaaggggaagagagatcattaaagaaagaaagtggtcatgctcttcaactctatagtcctgggaaccagccacaggaataatagtgttccagccagagtaatcagagcagatatggctaatagatttcaacctgcgttgaaataataaatgattgatacgagctgcctgcagcacagctgtgttm

SEQ ID NO: 93521 - DNA, 32571 bp, Homo sapiens
ttcactgcaacctctgcctcccaggttcaagcaattctcctgcctcagcctcccaagtcactgggactacaggcatgcgccaccacacccagctaaattttgtatttttggtagagacggggtttcaccatgttggccaggatagtctcgatctcttgactctgtgatccacctgccttggcctcccaaagtgctgggattacaggcgtgagccaccgtgcccggctacaaaaaaactttaaaaaaaaaattagccaggtgtggtggtgcaacctgtggtctcagctacttgggaggctgaggcaagaggatattgagcccaggagtttgaggctgcagtgagctgtgccactgcactccagcctgggtgacaaagtgagacgttatctcaaaaaaaaaaaagtctgaactagagtctgagttaatgaggagtccctgtgctgatagctcttcaaaggcaaggtcactttcatggaaggaaatggcactccaggccttagtggtcaagtactgctcggcctcttgcatcttctgttatcatggtagctttgttttttcttttctccttacatttttatttttaattgacaaataataattgtatttgtgggatacgatgtgatgttttgatatatgtataccgtgtctttcacctttaaatgtttttaaattagctgtaccttggtttagtttcctttaaaagcacactctgagactagagtttgggtgcatgttgtttatttgagaggtgctcccgggagcacggtgtggcatgcagagcacccaagagggaggagaaccagtgaaggatgtgtaagcgagcagagtcccactctgggcaactggagctccaacacacgggccagcctccaggagactgtgcaggacatatttcaaaagtggtccactcagggttgaggaagtggggatgtttatccaccaactcctgcctctaattggtgacaacttctgggggatgttaactccacatactgcaggcctgaccagcacaaggactagaaaatgccctcaagcaggaaaacaggcacctgaggtaggaaggcttttatgtatataaagaactgtccacttctgctgcagtgacttgagctgaggaggcacctgtaggcacctgtagtagatgctatccttgtaacagggcaagaatagcatcgattacaggggcttacatttaaaaatcaatagatttctcacaacaatctatgaggatcataaaaataccagaaaatctgggcttgcattcccacatgggacagcaagctgctgcccccttaatggaggcatatgctccctgatgtgccacactccccaccactccctaatgtctcttgcctgaggccaacagccaggtttttgtttgtttactttttaacacccaacctacttccttcctctatgttatctgcctggcccctccctgaaggagcctgagtttgtcaccttttaaggaggagacaggctgccattgcatgtaggccaagtcgtctcggagacagcatttgatttcctgggaccaaatctttaaatatgaagctgtaacaggaacctgggggcctctcttgacagcctgcccagctctcattatgacatttagcctgtgattgatattgtgtgtgtcattgagaccttggcagttaatctctgggtcgaatctatggaaaccaaacagaacagatttgtcttcccttccatgttggctgtgatctgggaaacagatgctcctggcctctctgagaattagagagttgggagccatgcagagagggtgcacacaggccgccttcaggatttggaaagattacaggtctgtggtttctggacggttccacactttgttctctttccccatcaaatctgcgtgctggaggataatagatcccagggctcactctgcgtgccaagctcctcggggtagaccgcaccacttcctcttttgtctggaaatccagccgaggctttcagcacagagatggagacggggatggttccctccacagtgtaatgaaggaagaatggcctcaccaagggtgaggtcagcttcagtgatcaaaggaggcagacggaggtttcagaayggaattgactctagcgtctcccgaaaatcacctcttctgaagcttccattaaccgcaggcagagttcaagatggcctaaaccacctttagatgtatggtgcccagcttctactcacttcgaacaagaagagtgggtgccatggacgggctgagcttcacacctttagacactgtgggcctgaagcaaggagagctataactacgtatgctcttaggggactgaaaggtctgggctcgtttctgtgagaaagatttctggccactccttaaaataatttcttccttcctgactggaaacacagcaggcaggccccagaatagagtttgggcctgaatgaccacccgtgggggagggcagcccaccctgcgcctgcagtcccctcaccttctccctcctccaaatcagcctggaggctcagtcctgccttagcagctcttgctgagccccttgcacaggcctcacagcccttaatcattccttcacccctcagtcactcattcactcattccattcattcactaagccacttcctcatccaacccatatctcctgagcacctcttacgtgccagacaccaaggctacagagagaagccacactcaggagccccgaagcaaggtcctctctcctcccagcctgcagctgcattctgggccaaagaccrggcctcccaccccactgggacagcgggaggcattttgaatgagcaccctcactacctttcccttgactccgcagcaccctggctctctagccacatctcagacaattattatcaaactttactaagcgtcagactcacttcggagctcattgagatacagatgcctgcgcccctacgagggtgcagcccggatatctgtatttttggttagtgccaggtgactctgacagacatggtcttcagaccacactttgagagacttcacaggagggtcccctttgctgcctattgccctctccacacttcaccaggaagcaggaagttgttggaggaagtcacaaaccctggcttcccacaatccctacagacactcatggctagctagtgatcctttaagtcatctgctatggacttgggagaatccaattccccaaagcagtggtctcaaccctttccttttaaatttctatcatggagaatttcaaacacacctgaagagaaacagcaactggccaggtgtgatggctcacacctgtaatcccaacactttgggaagctgaggtgggaggatcacttgagctcaggagttcgagaccagcttggccaacatagcgagacctcatctctattttaaaaaaggaaaaaagagaaacaacaactaccttataaccatcatccagccccaatcaccatcactcatagccagcccatctcattcacacctacatcaataccttgccccaacattatattatttatattttccaactatattatttttgaagcaaatatttcagtatgtttttctaaaagataaggccctgtggtataacgtaactgtcctcggaatctccagcaagtcggctgatagatatagacctctttggtgagatgattcccgccatggtggtgtgctcttctattcgaaggcatatgatgtctgatcatctcttcttattcatacgtggctggcagtttatgctcagtctctggatgcagcaactcatcaggtggtgtaaaatggtgcttccttctttattcattatctggaatacttctataaaagaacatttcccgtatcaacccagtagtatatagtttgtaaaagagagaagcaatacatgcagattcttctcctttacctatccatcttcaaaataaggagctggttcccaaacatcttccaaccgtgcataataagttttgggtttttttttttttttataaggtctcactgtgttgcccaggagagcagtgatatgatcttggctcactatagcctcagcctcctgggctccagtggtcctcccacctcagcctcagcctcctgagtagctgggactacaggcatgcaccaccacacccagctaatttttgcatttttttgtagagatgggttttgtcatgttgctcaggctggtcttgaactcctgggctcatgcaatctgcccacctcagcctcccagagtgctgggattacaggcataagccactgctcccggactgttttcagtattattattattattttgagatggagtttcactcttgttgcccaggctggagtgcagtggtgcgatctcagctcactgcaacctctgcctcctaggttcaagcgattctcctgcctcagcctcccaagtagctgggattacaggcacccgccactacacccggctaattttttgtatttttagtagagatggggtttcgccatgttaggcagtctggtcttgaactcctgacctcaggtgatctgcccgcctcggcctcccaaagtgctgggattacaggcatgagccaccgcgcctggccttcagtattattatgacctaagtgtttgatgtgttttgatccactggaattatttttatttttcatgttcaaattgttccagttttgataagtggaagcttcttcaagttgtattctgagtccctttgacatgttcctaatggtctttgaagccatgaaccctttcctacattctctgcatccccggcctgcccctcctcacactgcacctcccatctccctccccctgacactaagaccctgtgctacagacagcctcaattcatgatcctccttatctgtaaaatggggctaatgatagggtattaggataaccctatctcagtgttgttaagattaaatgggcttacaatcatcaagcacttggaatagtgtctggcacacaataggtgttatataagtatttgtcaaataaataaacaaatagcattcacctccatggttctcagtcttcccaccttttcctccttctctccagtctcctttcccaggctgaccataggtgcatcatttactcagctcaggaaacaatcaatgtccaattccactgcaaattcctctccttggggacaatggaaagtcctctcccacattccactggcagagcctaacaagctctccaaatgcacatttcagtctcgaggcacagctttctatcttggggcatctcttccaatccccttggtaagttaacacagtgatggccaggctcccagtgtgagagtgtgagcattgccttcagctcttctgacaggttaaccctcatgcagccaggtttcctcccctctcaaggcttctgaagtcctgctgatgtgcgtgtggcccagacccaggcccgggcaggtatggccttggcgatgtactctttccactggctgacggctccctgcagacactgagagggccacaggcctggaatgtcaggaatcttctgggccttcctattttgggtcccaaatggcccaaaccagtaggtttcagtcagataaaggaaaaagtaggaaccaaaggagtaaagtctaaagaaaggtgggaaggaactggctgcttgcaggatttcttagctccagagcccgccttggcccacgtccaaggaccccagctctccttctctagaaagattggaacattggggaagtgtcatttaactgccatcatggccttccttgtttacctgtgtggcctgggaagaggaagccggggcatagcaggttggggaaactctttccaaattttaagataagcttattcccacctctttttgtaaagcctattccctgcctcagtgtcccctgctaacccccatcctgcttctctctcataaccagctgcagaaaggagagaaaatcccttggctctaaaatgacatctggagaagtgaagacaagcctcaagaatgcctactcatctgccaagaggctgtcgccgaagatggaggaggaaggggaggaggaggactactgcacccctggagcctttgagctggagcggctcttctggaagggcagtccccagtacacccacgtcaacgaggtctggcccaagctctacattggcgatgagtaagtgcccaggcccaggctcgcttgggagcaggcagcagcccctccccaggccacgccctgcgccacctcctagccatgggctttggaatttgtagtcgttctgtgagaactcaattagttagggctgggcttrccttcacaytacagaaaacctaaacaaagtcttaggcaagatagaggtttatttctctctcacatataagtgcagagggaggtgggctggggctggcacggccactgcagggtcatcagggactcagactcctgtgtttctgcgccactgtcctggggacgtggcttcttccctccaggtgctgcagggtcccagattgccgccaggaccccagccatcaactctaggacccagacagcaggagggtggagggaaagaaagagcagaagggcatcttccgaaagcaaagtcccatcccagacttcccctgcccctagctgcaagggagcctgggaaatgtagtcttttattttagctagctataataccctcaagaataaaatcagttcttaggtggatggtgcaggaacacatcaatatatgcctggaagtatgggagcctaaatttaggtcactgtcacctcctttagatttttataaccaccattccccactccctacacaactgagatgcacctactgtaaataatattaataatgataacgactatcctttcttgaacactgtatgccaggcaytgtgctaagcatcctgcatgcatgatctcattttactctcctgataacccagtgatagaggctaattactcccattataaagatagggaaactgaggcacagagcagttaaataactggcccaagtcccacagctcagtcagtggcagagagctgggattaaaatgcagctctgcccaacccagaggcttgttcttaactgctcctccctccactctcccggactccagccatgttccatctcaccaaggagcagatgcagatgctgtaggacccctccatatattattgtatttattttttttctttttctttttttttcgagacagtctcaccctgtcacccacgttgaagtgcaggttggagtggtgtgacctcggctcactgcaacctctgcctcctgggttcaagcaatcctctgtctcagcttcccaagtagctgggattacaggcacctgcctccacacctggctaattttttatttttagtagaaacagggtttcaccatgttggccaggctggtctccaactcctgacctcagttgatctgcccacatcagcctcccaaagtgccgggattaaaggtgtgagccaccgtgcccggcctatatgtgattttaatacatatcttgctgcttaatacctggagataatcgtctagccataggaagatccagggtaagcatcccttgcctttcgtctttctttttttaaattgaaaaagttacaaatatgacatgcttaattatactaggttaaatgaggtagagggttataaagacaaactgcataatctccctttgtctcctcttaattctacccctgactaaccagtgttaaatttacttgcatacttctactaccttgtgtgggctattgccaacataaggaaacatatacacacatataaagggtttacttttttttttttttgagatggagtctccctctgtcacccaggctggagtgcagtggcaccatcttgactcactgcaacctccacctcctgggttcaagcgattctcttgcctcagcctcctgagtagctgggattacaggcatgcgccaccacgcccagctaatttttttttttttttgagatgtccctcaatggcgcaatctcggctcactgcaacctccacctcctgggttcaagtgattctcctgtctcagcctcctgagtagcaagagtaacagacacctgccactatacctgactgatttttgtatttttagtagagacaggatttcactgtgttggccaggctggtctccaactcctgaactcaggtgatccacctgcctcagcctcccgaagtgctgggattaaaggtgtgagccactgcacccaggcctatatattttttaagcaattaaaaatgaatcataggctgggtgctatgactcacacctgtaatcccaatactttgggaggctgaggcaggaggatcgcttgagggcaggagttggagattagcctggacaaaatagtgagatcttgtctatacaaaaaaaacacaaaaaacaaaaagcaccagcatggtggtgcacacctatagtcccagctactggggagggaggaagattgctggagaccaggagagtgatgctgcagtgagccaagattgtgccactgcactttagcctgagggatagagcaacagtttgtctscaaaacaaacaaaaccccatactatatatacatactgttgtatacttttattaatccatagttagctgtgccacaatttacccacaatttctcagttgtgaacattaggggaaggaaggagaggggtgtacagaaactctctaaggttttcttctttgaatttggctttattgagaaataattcatagaccataaagttcacccttttaaagtatacaattcagagcttttgttatatttacagagttgtgcaaacatcaccactctctaatttcagaatatttttgtcacctcaaaaggaaaccctgaacccactaaacagtcactccccattccctacctgcctctcaggccctggcaaccaccaatctactttctgtttttatagatttactgattcccagacattctgtataaatggaatgttataatatgttcctggctttcttttactttgtataatgttttccaggttcatccaaattgtacttgtatcagtatttgattcctttttattgccaatctctgtgtgatatttgcacgtttctgtaagtctaaaattagttcagaataaaaaaggcacacatatattttgacccaaaatatcactttaagaaatgtaatttacagaaataagagtagcaataatgagaaaatatgtgcagcgatgcttattataacactgtttgaagtagcaaaaaaaaaaaggagggactgacatctctagtcttttaataacaaaatattaaataaatgtagtaaatatttcctataatgaaagtaataggccgggcatgatggctcacccctgtaaccctgtaactttgggaggccaaggtgggaggattgcttgagcccaggagtttgcaagtagcctgagcaatatagcaagacaccatctctaccaaaaatttttaaaaattttctgggcttggtggcatgtacctatagtcccagctacttggggggctgaggtgggcggatcacttgagtccaggaggtcatggctacagtgagctgtaatggtgccactgcactctagtctgggtgacagagtgagaccctgtctcaaaaaaaaaaagtaacatatgctcattgtgtaaatagagaagtctcggtttccctattggtaagaggctaataagataaccttcctcayagggctgtatggattaagttgggtaatgtgtgtaaaatagtgcactgcctagtacataggaagtgctcagtaaagtttagctatgataataaaaaaatgataaatgtaagaaagattgctttcaatatcccaaagcagtcaccaaaggccattacttcaaagatactcctattaatattgtggtatatttcctcctagactttccgaatattacttttggttttggaatttgtttttatataattgtaactataatgattattcattttctcttatttctcacatagcatcattcataaacattttcttttattacttcttatatatttaattataatagacatgacaatatatcagatgaacagaagagcattcatttaactacttccttattgttgggcatatcagttatttttatgttttcacttttataaacaacactgcagtggacatctttacacataatgttttttctatatttagaattatttccttagatctgaccctagaaatggtacaactgaggaaagattaagattttaagacttaaactgtctctgtatctttatccatgctgttccctttgtctaaaatgtctttccctgcacctcatgtccaagtccagatcctatgcattcttcaaagtccattcaagtcacttctgccatgaagctagcttcctccaatccccatagtgagaagtaagctttttctctgtatattatatactgtatttacctttcctatggcttataataataatagttaagttgtattgaattcttaggtggtaggtgtcatgccttgtgctaggcatcatttagactcctcaacaaccctataaaggaggaaccattttacaaatattattcccattttacaaatggacaagtcacagctcagagagttcattcattcattcagtcagccagtaaccctttactggacaccttgcttggagctgcgggggaaaaaaagaagacactgaagctcagagaaatcaagtgaccagcccaagttctcaccaccagaaaggggtaaaatttatactcaaatccagatcaaaaaaaaaaaaacatggtcagtcaggtaaagaagctgtttcagagttgaggaggggagagggaggagatgggtagaaatgtaacagggaacagaaacagcggtgagtactagaggggaaggagcacggggtttgagtcttggctctgccaattaccagttgtgtgaccttggacaaattattttacctctcttcaccttatgtggcaacaataatgggacttatctcactgggtgaagattaaatgaaatcaaacaaatgctagagtagtatctggcaagtagtaaatgctcagtaagtgcttggtgctattatggatctgagaaagatcacagaagacatggatctaggctcgacttttgaagatgggtaggatttcaaagaaattccaggcagaggaagcaggatgggaatagctacagaggtgagaaaagcagggagattcatctggaatataggggatgaatgtggtacactttcagaaggtccaagattaagccaaattctactgctgtgtggtcagtttcgattagctgtgctagtctaatagctcaccccaacatcttggtggccggccacagcaatgattctttctcactcacamtgcagtccatggtgggccagctctgctgcgctcccggccactttactctaggacccagggtgatagagcagccctgatttgagatcttgccagccttgcagcagagagaaaagagagayctagcaaaccataagctgatttagaagtgacacatgccatttttgcccacatttcactggcaaaagcaagtccacgccaaagcctcatgtcagtggggcaggaaagtataactagcgcagccagaggggctgcaaacgttctaacaataatgccatctggcacagcctcctggtcaggtgcattggctttgggcaggttattttaccttttcctcaacttgaagaatagttggccaggcgtggtggctcacgcctgtaatctcaacactttgggaggccgaggcaggtggmtcgcttgaagtcacaagttcgagaccagcctggccaacatggcaaaaccccgcctctactaaaaatacaaaaattagccggggatggccgggcgcrttggctcacgcctgtaatcccagcactttgggaggccgaggcaggcggattacgaggtcaggagattgagaccatcctggctaacacggtgaaatgctgtctccactaaaaatacaaaaaaattagcctggcatggtggcgggctcctgtaatcccagctactcgggaggccgaggtaggagaatggcgtgaacccgggaggcggaggttgcagtgagccgagatcgcgccactgcactccagcctggtgacaaagcgaaactccgtctcaagaaaaaaaaaaaaaaaaaaaaaagtagacaaatgcaaatattatagttaacaaaaaagaaatctggaaaggtaggtcagggccagctcatggaagggtgaatgacggccaagggactttattcagaaaaccattgagtgtctgagcagaactgacgtgttctagttaatcgagtgctagacaataaaatatgcttgcctccttgatgtttgaccttgaacttgcttctttcaaccaagaaaatggaaaatgtcactgcccttttaattcaatccaactgtgcctaatcgagccccaatacaagcacacacaggtgtgtgagactttacacccccagctgagggagggagcctcaagtcagcatggtgtgtgcttgtccctgatttctgtgacactcacttaacaaggttaatgagactcacagacgcttattgcaagagcaattaactctaccgccaatgcagccatgcaaaggttataagctgggctgtgaacaggcaaggctgcctgtgtttcttggtctctttgcaggggttgcccaaagcagccaaaagctccaagctggttcctcatgcacaaagcctcagttttaatttgatatttacatttcggttaggtttttcctttccctaaaagcacctaagatttttgaaagcccagtaccaaggctctggaagtgaaggaggtcaggacccaggagtaaggatggatgtcctgggatggccaaagctactatctatccttggagcccaggccagtgactgtggggcctgcagcggggcatacttacctctaagatgaagctcactcttttccttgctcctttttgtggagataggtggagcggccaagcatctgctctgggtccacagtgtctggactgaacactggtttctgtgtggccttgggcaagtcactcaggctttgtgactttcagcttcttcgcctatgtggattctatgcgttaatgcaagcaaaacatgtctcacggtgcccagtacattcatcaagtttgaactatgacaaatcaggcaggttctggaaattcgattcacagtgtatgaggaaggtaaagcacagtcactgtgccttgccacccagggtcccccatgctaggggaagccttgggagagaaaacaaccctgggtcagatttctcccatgagaattctatcatgacccagggcagagtgttggaaggagggcctgctctcctaggccttccagggaggtgacctaaggcctaagaaggcagccatatcaaagttccttgggcctgcgggtttcaaaatcgctaaagcattttctccatcccaggttagctcaaggggattcaccaagtgggctgcctggtaattccaagtcctcactgctcagcagcccagggaaggggaaaggtggccctgccagtgcagcctgatgagaaaaggccacaaacaggagggcaacgtggagggtgctcactctgccggctcagcagaggggtcgaaggggtggggcctggctggccaccttgcagatattcctggggttcgggggaagtcttcttcacacaaggtgtagccacccactccccactcattcctctaactcgataggggtctgaatctgccacaagtggaactgcaggctcagcgtggagcggagggctcaggcatgactcggcacagcgtcccagtccccactgtgtgtgggtggccaccaactatgggtggcctttggcaaagcattttattgttctgggactcagtttctttatttgtaaaataaaggatgatttcgaaggttcccttccagctctaaaataaaattatttaagaaatggcctattaaatgaattaggctttattagtttcaagcacacacttgttttattacttttaagtcattcaaattagattcaaattaggttaaccaagtgttgtcctccagagagccagggactggcgtcaatgatgagataagaataattcatcacctcttatcaatcagcagtccctaaatgggtgcttcaaaaatgcttgagtacgctcgaaagcactaagtttctgtaatttaaatattctcactttaatctcgttcacatctttcatttgcttagcaaaatcttttttcagtcctttttttccctatagtcagcaggaggggaaatatcctggctaccatcaaagtgattgcaaattcctaggcagggcagcctccagtgataaggcttggctgaaacgggataattgagaaatctctcttccctctccacaatgcgggtgtcggagagccagtgccagggtgargttaaacttctgctgctcatggaatggtgcgggccctcaggagctccttatttttgtgtaaactacagttgcctccaaggtccggcatttgggctcagattcctgccaaggcctgcagcctgccccacccacccagcccaagctggctttccagggaacctctgtcttgtcctttctgcttttctgcttctgaccagacccacagcctcagaagccagaggcatcgccacagctggcytggcgttgagagcctgggaagtgaagtgaaggcaagtcagtcagctgagacagctccttctccccgaaaaggaggaactaattccgccttaaggcaccgagcacgaatgaaattaacctgcttcttcgaggtgtgggtggtgtggccagtttaggatgcagcaaaaaacagtcaaggttgcgaatttaacatgctgggcgttacctgaaataactaggacttccaactactgaaggcaactgaggcatagctgggcagcagtcacaggcaagacggtcggggagagaagcctgaggccctggcctggcctggccttctcattgccagaacacggcttagcagtcaaggcctcaagcaacataaaccatctccttgcatggttaggcaaatgccgagtccaatcactcacacgacatcatttctcaaaaccagacctcctgggtactctcttctcttcacctccatccttggaggaatagagtttgggagagtggggcagacaggagatttccagtagaagttaaaaaccccgaggccaccttatgcctttacaatggtctctcctgaaaactaaggaaataacaatacaaatcatgctatatttacatagtaaatgaatatatgactcgttcattactgaaaatgtacaaaatgtagaaagacaaaaacaagaaaatttaaactacatataatcccattaccacattttgtcatgggataagcacattctgacataaatctttccactgccttttccccttggagtcatcttttaacctctcaaagaagcttcagtattgcatcattcaacttcacaagactctcacaaggaaagtactgccagtgtaatcggtactatttagcaaacaaagaaaacggaggctcccagcagttctgccacctcagttcatgcgtcagtttcagctgtcagccctatgttttctcaggtgcctcaacacggaggagcttcaccctcaagtaacaagaacacccaagacaccggaaggccggttcatttcactttcccatcaggtgaactaaccgagatcagatgccagaaatgtgcccactgttttaaagtccacttgcaaggaacgggcacactcaagactgcacggttaagactccactgggtttgggaggtggaggcaggtggattacctgaagtcaggaatttgagaccagcctggccaacatggtgaaaccctgtctctactaaaaatacaaaaattagccacgcatggtggcacacacgtgtaatctcagctactcgggaggctgaggcaggagaattgcttgaacctgggaggtggaggttgcagtgagcagtgagccgagattgcgccactgcactccagcctgggcgacagagcgagactctgtctcaaaaaaaaaaaagaaaaaaaaagtaaactacatgattccagtgaactgggaagagtaaaaaaaaggttacaaaaaaaaaaagtaaactgcatgagtccaacaaatgtgtaaacaatgtccatcactgctaaaatgaatcagtgaaaacaagacaccattaattttttttgtctatgaaattgacaaagaatacggactgcaatttttagcaattttagcaagttttctgtagggtaatttagtaacaagtatcaaatgtattttaaaatggccatatctgttgacccagcaatttcacctttaaaaatgtctcctacggacataaacagaggagtgcccaaagaaacacatcaaaatgtttggtaagaaaaaattgggacatacctatataatgaaatagcatgcagttattgaagtcttatatgttgccacaggaagatgtttacaatatatcacgtcaaaggttttgaaactttatatatatagtattgtaccaaaaaaaaacctttctataaaatatacaaatctatgcatagagaaacaatgggaggttcttacatcaaaagctaacaatagcctttatctccaggggagtagaaatacaggtgatttttttggaggggggagtatgttttctacattctacattgagcatgtgttatttttgtcatgagacgacatattatttaaaaattgaacagactgatcacatctaggattgtgcctaaccagaaactaaagctcctgtgtcatctagattctggaagtacattcttaaatctgtttttctttctgaagtcttttctccctcagcagaggcatttatgtggacccaggagtggggcacacggccttttctccatgcccatcacctcaaaatgcccctgtgtttcttagtctctttttaacatatgtgagcagataatgtatgtggccctgaaatttaaaaacaaaaccaaagcaatctagtgtcagacaccaccctctgagcctgccccactcccaataattgctgagctgggcatctgtcccatctggggactggacgatgggtgtctgtgatgatggctctgcctcccccacaacatctgtgtaagaggcactccatttatttgcagattcccattctgctgtggatgctctttcaagccctcaactgaactctgagtgaatgaagctgggggaagtccccagagtgatgtgtgaggataccaactccccttcccgtccagggagccaagaccctgaaaacttgtggtgggcctcaaatacccaccgggtctcagggtcctcacgagcccctttctctgcctcaggcacaaccaacgtcagcctggtgtggtggatatggaggtgtcaggcaatgagtcttgttgcatatctatcccgctccccaaaagtggcaaagtgcaaactgttattcattcaaactgccacttgattatgttgaaagccagttactgaacccagagagaacagtcttcatggtgggtaggagcttcctgtcaagaagagttaattttaatttttccactgagctcaacctcaaagtgaggttgattgctactcagcaagatggactgcattagcggcggctttaattgggcgcagatctacgtccccaaagcataatgtttgttgtacacatactttggggcaagacgaaaaatgaaaagcagacctttctaaggaaaaatggaaagcacaatgtgtcccacagtcagaatggccacactaagagccaagtggaggggggctcagtgggactccccacctccccatgccacagttctgatgggctgtctgcaaatgtttccaaatgctcaattcccttcccaaacactggacaccatcatggttctcatgccaaataaaaagctccaggaaaccaatgaaagacaagcgcacccttggccgaggggccatggcatatatttctggtgtgaggcttcctcctggctcagggtgttggtccctgctagcatctaacatggtcacttctgtccacatgcttttaccagtggccttgagatgagccctcagctggagtgcaatgccacttttaccctcttactggtacggctccagacccttgtcacatcttccctgagctgaagtcctggtcttcatgctattgagggaagtgtcttcttaaacccagattgtatcacttctctttaaacactctctagagctctctttgactcccaaacacagatcctagcatccaggatccccacacatcagccagattgatttttctttttctttctttcttttttcttttcttttttttttaaagacagagtctctgctgctcagactgagtgcagtggtgcaatcacagctcactgcagcctcaacctccctgagctcaggtgatcctcccacttcagcctccccagtagctgggactacaggcacatgccagcatgcccggctaatttttttcccttatatcttgtagagatggggtttcatgatgttgcccaggctggtcttgaactcctggtctcaggccaccctcccgctttggcctccccaaagtgctaggattacaggtgtgagccaccttgtctggccagattgatctttaaaaaagtaaacaatgcttacttctttcttaaaatcctctagcagacttccaccacacttgcaataatactccttcctatggcgggcagggcccaccatgctccagcccctctacctttccaaactcctattccccttgccacttcagccacactggcttcctttctgttctcagcagttgttccctctgcctggatgaaacgctttctctccaactcttcctcagccttctcatccctcagtcttggcttaaacaccacctccccacagtggcctttcctgaccgccttgcctgaagcaggaccacagtcattttgtatcatgtcatgaagttttaggtccttcggatagctctcactgctatctaaaattatctttgtttatttcctacccccattagtatctgaccttcctgagggaacttcactaacctgttcttttgttttttgagacagtttcactctgtcacccaggctggagtgcagtggcgtggtctcagctcacgacaacctccacttcctgggttcaagcgattcttgtgcctcagcctcccaagtagctgggactgcaggcatgcgccatcacacctggctgttttttgttttttctttttgtattattagtagagacagggtttcgccacgttgaccaggctggtctcgaactcctgacctcatgtgatttgcctgcctcrgcttccgaaagtgctgggattataggcgtgagccattgtgctcggcccctgttcatttctttaccatcagcacccagcacagtgcctggcacataatagattgcaaataattatttggggatggataattgattacaggaaatagacaatgcttcctgaaaggccttcgttgtctccagcctccatacctcaggtggtgctgtttccttggcttggcccgcgcttgcctccttcttcccctccatcaccaaatgttgacacttgtagtgacacaggcctctccctgccccaccccacaggcaggaagaacccgtgtttcctctggcagcccatctccactccggccccaccatgctgccttctcatcgagtcatatttcagagccacctacttcaagaggactttactgttcctggaaattcttgcctagaaagataaagctgtagcccattaaataacttcactgctggcttcaagaacttccctgcaatcaattcaaacaacagatggctcaaaaagccctccttctcagaacaatgctctgcccagctgggcaacagctccccaaagcaacactttcccgttcacatcgtgccaacgtgaatttgtgaactttgcccaatcccaatccaatcctcttatggaaggccttgctttaaaccattcagttgagcgtccatctccaaaccctaaaaacatccagcaggttcagagcagaggttgggagaaggcagccctgatgaacaggttattctggagggctttcaggcgatttggcaggtccagatctgcgaccaccgtagaggccagcaccaggttccgctgtgtatactgaatgatgaaagaactaatggacgaacgaatagctcagcttgcctaccccagcctccaccctgtcctttcttgagacagccgagccagaatcacaaaacagtgcaggtggcctaggggaccgggtaagagcagagctttgggacttcatttgcaataactagtcctcattctggaactggaatccacagcggaaagcgtgggtggcccctgagtttcccggacccggggcagggcgccgcgcgcccacagatttctctcccctgcgcccagggcgacggcgctggaccgctataggctgcagaaggcggggttcacgcacgtgctgaacgcggcccacggccgctggaacgtggacactgggcccgactactaccgcgacatggacatccagtaccacggcgtggaggccgacgacctgcccaccttcgacctcagtgtcttcttctacccggcggcagccttcatcgacagagcgctaagcgacgaccacagtaagagacccgcggccccgccccgatcggccccgccccgccccgccccgactcgccccgcccgtagcttaggccccgccccttccccgccccamtaaggctccgcccctagcctaggctccgcccttagcccaaggtttccccgtctgaggcccaggccggaagcgggatgtgcgcgtgcgaaatctttgtcgcaaagctgggccactggggctgcttgtggccgagggtaaaggtccgagcccctggaagctgtgaaggtttaaggacctgcaccacccagcgtgctgctggtggggttcgggccttgattgcagctctggggaatggaaatagggcgtaagaataaaaggccttttggtcggagtctttgctaaagaacatttgccatccttcaaaaggcggaggcggtctgggagctctcaaagctgggactgyggccggagacactaattgtgcctgggcctgaacccaactagtagccaagggctttgatgccagaaaaccctcagggagctgacttgagtgggaatccatggagagaccttaaattctcctgcccaccaaccaagttacactccccagttacactcagcctcgtgaggcctccagtagaaagctgacaagctgggctttactggcacgctgtatttgaggtataatttgggttttgcacccccagcgtccaagttttcccagtgttaattatccagcttttaaatcacagtgctagtctttgtgctcagaatgcactgttggctaccctaatccagcaaaggctacaaggctattttggagagaagggcacagcttagggacgcatcgggggtaagacaatatacagttattgctgcagggtgtacttcagtggaattccacagaggccagagggacttcagctccctaatctgtgctctgacttcagcccaatgtgtcacacacccctttgtggagccatcacataattcagggtatctggttactgaaagcctttcttgccacaagaggttgtgattacaaggctcagtgactgaccaaatagtctgctgcaggaacttgcaacctggggctgggcctaggccaggtctgctggacaatatcagaccttaatggacatcccaaggtggccctggccccacagccaaccatagccaccaacaatttgtcattattttggctcagaaagcaatgtcacaatgaaaaaaaacccttagagctaacatgcctgtattagaagatgcctcatttccaggccttccttttatgagtctatttatgaaccatcttttgtgctgtgtacattctgggtttccaagcaggatcaaaaacacaactgaactgagtcatcaccacaaggtaaaatttgcctcatagtatttgaagttaactgaaaacacatttgacatgaaaaaaacaaagactgcaacaacctaatccttcagtttctgtttaatgcactcacttgccattactatattttagaccttacccttcatggaaggggcctggcaggcttcggagaagacagggctgggtttacatttctgtcacacaatttactaacgatgtgatttctctgagccttggtttctccatccggtgataaaaatatttaccttcagaggttataatgaggatcagcagtaacgcgcgtaaagcgcttagcatagaacctggtggacagcaggctctcggatgtatttgataaagcgtggtcatacactgtgaagcatataaccacgccagcatgtgcacatcatcatcgtaaagtttccaatcctcaaagaaaaaaaaaagacattccaactttgaactgtaagatatactcacatgaaagcttgttgtaggttcctggcactcaattttagggtctgcccccactgccaaatccagaaagaatcaggctctcaagttgaagcttaggcctaggcagatgacagaacattatgaggaggtgtcaggctgctgtggatcatgactgttagaccaggtggcacctagcaaacaaagggccaacggaggagagtagatacttggatcagagactatgagtgggatagaatgaatggatgggggtgccgggactcgaccagatggctagggatggggagcaggacatgaccccactggagatggcagggtaggctctgctctcagcacctttgcactggcatatctaaataattcaagtcagggctcaaacgcctaccctgcagaaccatgcagagtgtaaacaaatgaagatggctgcatgtacagcggaggggtgtgggtagggggcacttgtggctaagcagagagccctgtaccccttcagaggggcacctgccacccagcctcagctaatgcttgtcttgtgagagtcagtgcaaatgtgggagatctgacttttcagaagtctccaatctggattataaaatcactcgatttttaggtcttggcaacagattgaaatttcttaaaatgctgcaaaggacagactaaagcaacccaatggccatcaggttgtaacctgtgccctgagtggccagagcaaccaaacaaaatgcccgctagctcagcagcagcaatgccacagacttcatacccagtggacggcaggtgctcagcccacctgccacatgcagttgtgtctaggcaagggacactgcttggcattttagtgctggacctacttgtatgtttcttacactctctatgtaagtggtgtggatagacagtctggccaaaaagcaaggcatcactccttgcttcctcttgtctatgttctttgttctcattgactggtttcagccaagtgtacaccattccccctacctggcttctcacagccggtcattttcactctttttgaaaagcgttccttgtggagctgtactcgtgggctgtaatcagcccctggggccctctcccatcccatcactaccctgacttgaccctttataaagaactccccaggcaacctcagtcactcttaaaatatctcggagataatccagtccctggtcctgccctgacagctgggcaaacagaggcccagagaagacaagtgaggtgcccagggtcacagagctaatcagaggcagcgccatcaggacacctgcctaccagcggggattccttctgtcaccgaggcctcacagaagagtcctctgcccttattttgagcacctggtgactttgctgtataagaggtcaccgaatatcatggagggcgagtcatgccagctggttataggatctgaaaaaactgaatttgtcactcttcatcagaaaaagaagtactcacaaaatactgtcacaggaaccccacttgggttgctttaactgcccccgatkcggcatcctccgaggtgaattagtgtggttttaatttaatgaagtcttctaagaaactccagggcaaatgccacgaggcgctaaagatcagactttagtatcacgctctccttttggcagtccatggcctgcttctgaaggcatcttaaaatatattatggataagggaagtatgaataaataaatgaagcctgctttcaagcaggaggttgattctctggtgcttctaataagctttaaccgaccagattttcactgtttggtttttgtttttgtttttttgagacggaatctcgctctgtcacccaggctggagtgcagtggcgtgatctccactcactgcaacctccacctcccggattcaagcgattctcctctttcagcctcccaggtagctgggaggtgcccaccaccacacctggtgaatttttgtattttttagtagagacagggtttcaccatgttggccagtctggtctccaattcctggcctcaagtgatccacccacctcggcttcccaaagtgctgggattagaggcatgagccaccacgcccagccgattttcactgttggaagggtctcttgccctatctccctccagccccggcagttcataatacaccttgcaccttgtttctcagaacttccacacacctagaacctcttgggaagaagtaagggctctaccagaatttctttgcaagttactaagaaaggcaggttcccagatagtgcatgggagatgggcagaaagcatctcctgaaagcaaggaaggagtctgcttagcaaggagcacacctggctgcggggcggagcgtggtgcagggtaacagtcttagcctacgtctgattttcgtgacagaggcctaccttccagtcactcctaaaagcatgcaattgaggagcagtagagattctggatttgggtttccttttcttgagatgcagtcttgctctgtcgccccggctggagtgtagtggcgcgatctcagctcactgcaacctctaactcctgggttcaagcaattctcctgcctccgcctcctgagtagccgggactacaggtgcaccaccacgactggctaatttttgtgtagagatggagttttgccatgttggccaggctttaaccacatgggctccaggtgctctgactgtatgtgagaacataaggacctgcaagcataggtatgcactagctgctgctgttcctaaagatgaactgtggtcaggcatgcctcaagggctctgactgtagtcatgaagaaaagtatctccaagcatgagaggggcgctgatctctcccactgcaacaagtgtgctctggccagggggaccctaggagctctgacagaagttgggaaataaaagcccaacacaggtatagtgctggcccctgtgatggtaagagatgtgctctggcatgatgggtctcagctaatctgaccacaagaaggaacaaaagtgttgcctggaccttgattcttctcaataggcctgactcctccaatagtaacacatgtgcattcacccagcttgaactcccaacctcaagtgatccgcccacctcagcctcccaaagtgctgggattacaggtgtgagccaccgcgcccggcctcatgccctagtcttggaaacaaaattcagctcttggaactcctaccagagcttagtgtcctctgtccctccttttcccctttctctcctgctccctccacctccccctctcctcccaccccctccatctcccttccaactctttctcccctcccctctgccacttaacagaattcaggcccccaaaaggcttaatgaactacagctttcatctgtttcaagtactgagtcatgacagaaagaattaccctgttttctgggagaggaagaaacgctttggttatcagcagggctggccagaggcccggcagcctccagaaaggtccgtgggatttgaatgccaggggtggacattcatccagctggacacgttcacaccccaggagcgcggtcatgccagggagaacctgggaccagcctcccccagatccgaaacagcaatcaagaagtgggtgcttgctttctggccatggtgctcaggggaaaggcagcccagccacactgtaggagctcagcagccattcattagcacaaacaaattgtgctaaaatcgagttatttacagggttatttgccttctcaacaaccctatgaagaagacaccgagagtgtccccgttctacagaggcagctgtggggcacagtgctgagtcactttctgtgggcgagagggtgacagtcaggatgggagtgggccctacctgtgcccccaacacctgcccctcagtgtgggttttctcctccctgctccatctgcaggtaagatcctggttcactgcgtcatgggccgcagccggtcagccaccctggtcctggcctacctgatgatccacaaggacatgaccctggtggacgccatccagcaagtggccaagaaccgctgcgtcctcccgaaccggggctttttgaagcagctccgggagctggacaagcarctggtgcagcagaggcgacggtcccagcgccaggacggtgaggaggaggatggcagggagctgtaggcccgactcacagggccagcagaggcacttggggacagaggggagaggcagaacatagccctggcctaggactccagagaagggatggtgaaaccgaagctcgactcttccaaaccatcttgttcaacttccccatgtgtgctggggacagggaggacccagagctgcccccgggcagagctgagcgctcagcctctcagcaaaatgggagggacgggctccccggctctgggtcacagaggagcatgccacgctgcaccaagtctcctgctttggttttgtttttttggtgagaaggaagagggaaaagattttaaaatgtgtaggcagtatgttgtgattaaacgtttggctttgtctgaaaggaaagtcatcttcttataaaaagtattttaaaatagaaattgcttttccaaccacagaaccgtaccaggtgagcagtgtcacgggagtgcctgcgtagctgtggaggctccttcccgggcatcctgcgtttctgtggcatcccttgcacgccgcttgtcttttcagcggaacccctaggctcacgccaccatctctagatgtgctcctccagcagggtggggaggggtcctgaacctctgtacagaggcccctgctttaggcttcccccactttcccaagggacgcagggctcctcagactcttagccagggctgccactactcagaaaaattcaatgaattgtggtgagtttggacaagtaggagtttgactttctaattttggggaaaaaaagggaggagaccctctctagcggggacctcagggaggctcttttcacgtgggttctagtcaaagcaacacgagctgcttttcagtcatagcagaaagtatttgcaaattgttgtctgctgtggaatgggacgatggggcagccaggtaagctcaggtgtggagtttgcctccctgagagctaagccaggcacgatggctgcgtgatttccactctgaaggagaaaacggcagcagacatgaagcgggtagtgacagcttccagggccaggaatcccaaaccagacagaaaccaaagagagttgctgctgttggagatgccggccgtcaaggaccaggcatggaaatggcctggagaaaccagaatgtgataaaggccttctaggaaaaaacgaaaaggggcccggttcttcagtttggttgtagttttcagcagaatgaaagaggaagttattgatgggtggaggagagagtccagggcctcagcagaagtgtaagccacctgagagtcaccctgtgacctttggggatatgccctgcttttgtgcccctgtggctaggcctggcttcctgggactgccctgagtctgctctgagagtcgccttggcccaggaggagccaaggccctcatgttaacatgcacacagggcttgggggggcattccccggggactccctcatggtaagagcactggtcttctaatacattttgaaacctgaaacattgcaaaggggtcgcaaagcaaaaaggcagagatgatacagaaatagaaatgtgcagtgaactggtatgtcctggtgctaagacagagaagggggacatgttccctctgaaagcgcgacagtcctgaactggacagagattgggtgtatcagtcacaactcatgtggctgtgagggagagagcaatactgggtgtatgacgactacggatgatggaattgcttagtgactcatacttgggtgtgagaggaccatattccagctcttgggaaagagatgcaggccaaaagggatccagggtcatagtggccccaacctaggcttccccatcaggatcctgctaccccggtctgaactcagttattgcttagctctgatctgttccatgtccagagagaagccaatatttctattttaatgaatatttacatttagatgaattcacatcagggaggatagagtgtagctaggtgcattgttggtgtttcctgagcaccccacaccttcctcatgctctcatctctttgtgggactctgggtcctgctgaaggcaacagaagctgagaatggcaaagttgcggttctggtctcttctacatgactcctgggagccagaagcaggagaaaggaggaacagaagtttttgcaaaagtgtttcaagtcttcagaaataagatatgaaatatttgtttggtcaccaagtgtctattgagaacctaccacatgccaaaacctgggttaggggccaacaggaaaaatgaaaatgcacattgtgatagagcacaatgcaggaaataggcatggaggcagagaaaagtggggaaaggggagaaaccctctttaggcggggtggtcaaggaagacctctcttagacttgaaggcacaaaccttccaaatgtgccggagcattcgaggctgaggaactgcccatcagtaaggctggagctggtggctgagagtgggagtggaaggagaggggcagagggacttgattctattccaggtacacagaagattcactgaagggttttaagccggggaatggtatgatctgtttcaagatcactctggaaagatcctttggctgaagtatggagaacaggttgtagggagttaagaagcgaggcaagagcagttaggaggctgttgacaggaaaggaaatgggctggactgacagcaccaggggattagtattcaagattattttggaattaacccagaaaacggacgggacctcccgagatggggagggaaatgagggctaactgatcgaggtttctcggcagtgctttaacactgagatgggatggaccagagcaggaacggaggagcggtcggaaatcaccagttcggttgtcatgcagatgtacaaaaggtgtcccaggtcatttgacgtggcatctaaagctcagaggaatattcacaactggggatgtaattccgggtgtcacctgcagagaggtggaatttgaagtcatcatactagatgagatgatgagagaaaacagagagaacactcccggcctgagtgttgcagaacatcaatgtttataggtaagcctgggtggaggaggaaggtccaggaaaggggatggagaaggtagaaggaacgatggaaacctgggtacagagaaatggaaggtgctgcttcataatgtaacagtacgtgtactttgagtatcgaagattgattgtagaccaaggcttgctcgcagccacaaagggatctgtatttatatagcacttaacagtttttacagcaacatgtattcattagccaagcctttaaatcagagaggtgacaaattagggcctttcagaatacagtgtcctagaaaaaaagagctgggatttggaaagacctgggtttgtttcagctcacacattttagctgggtgagtttgggtaattaatgtagcttaatctgagcctcaacatcctgatctgtacattggaaagaatggccccatttcctgcacagggtgggtgtgtgggaggagtttgtgaaagctttgtgacgatattgtgagtcattacttctaaaatagaatgttggtgaggaaggtggatgccctcccacctggcgtaggcaccacttgcaactattaaaacgtgaggctggcaactgaccaccacttggtacgactcttacaaataatagaacacagttagggtttaaatgatgtggcctgttaatgaatctcaatcgaatgaattcagctttgatgaatccaagttcctgtttcgccaaatccttggcgtcacattcagatgtgaactgatttctctagtgagagtgggtgaggtggagggcagggtgttctgaggccatctcagatcagcagtttccttcctatgctaagcctttctgttccatcaaggaatgttgggactggggccagcacggaagctcctagtcctagctatgctgcagtccttaaggagcctgggcaaccgaggtgtccctgggactgttctaagattagggtttggcaggtctggggcaatgattgggactcttccacaagctcctttagagggctgttaggctggcagggtatgggaactcagacatcgcacaaaccacaaggtgtgattagcaggtcatggccaaagggaacacagaggggaatctcagcccccagagaatcttaacccaagaggaaagagacaaaatatgtgacaggtcggagcccgttcggggctctgcttcccgatcagattgcttccaggccccaaccccacctccagggctcgggcagcctcttgcccgatgtgtggcccactgggctgcccagtccttggccactcctgaatggacgcagtgttcgatttgtgcaggcatagaccaccacttcctactctgaggatggctgataggtttcttttcctattagcacagcagcttaaatggatcttttccctttgtgctgacggcccttcagacgtgtcttcttgaaagccctccctcagctgttacatatattacccccattgactttgcagttgaggaaggaagggactaaaagataaaattgtgacactaaacccaatacactttgtaactgtgaaagaaaataacgataagggtgagagtacaaggcagaactccactgggcaccctctgtctgcacaaggccttttattctggtgtgtacgctctatcctgcccttgcacgattttgggtccactttaaggcttatgtctatgctttgtaaaacatctaatttttgtgtgtgtgtgttgaatcaacagtgcaaaagcaacttttttcctccacagggtagtgacctgcttaacagaggagttgcgagcacacgtgttcagacacctggagagcttaacgggctagtttcacacgggtgctaggtcaagcattcatttctagacttgttgctcaaataaccaaattcaagcaacactcagaactttctctgaacgctatacttgtgaatattcacttttggcagggggtctaaactttagactctaaagaaaacatacaattaatcattcacaacagagcaaaacgttcacactttttaaaaagaaaatgatttttcaaacatacaatcccaaattgggtgctttttttggtatgaatctttataaaaaggaagtttgctaccctggtgcgaggcttggagggatgtttctacagactgtgcgagtgaggcagctggatatttgtgcgggatctctttgcaaatgaagatcaaagtccaaaagaaaaaaacaatttcactttattttaaagacaatgattggcatacagaaggtatgcactcgcataaaataaactttcatgaaaagcattaaaatccattataaattaatttattaaataggtatttggtatatgtgatggttttattagatattactcttatttattgccaacccctcccccaaagtcaaaacaaatcagaaaatcccataactccaatttacactaaataatttattttcccaaaatgtgtatgtgttctgaggcgtgacacatgatacagttccattggtcattctctatcaatcataatatgacaggacacaagaggctaaaaatggctcatcataatttattttatgttaaaatgtacagcttttttttgtttgttttttgtttttttgaagtgactgactaaaaagagaacagataaatacaagagtgtcgctggatcctattttatacaaggattacgcctctcctgcttggcccttactgtcaccctgtacaggtacaaaggctacaaaaaaggaagcaatataaacagacacaaataacttttttgcttttttacatgcgatttgtaagcttagtttgagctattcacaagctacttttctatttttccttaaaaaataactccaatattttataaagatagaaaaatctacagatggaatgaaaatgtaaagttagaggcatttccataaaatagcaactttacaccaaattcactattttttt

SEQ ID NO: 93522 - DNA, 241745 bp, Homo sapiens
  misc_feature (1)...(241745): n = A,T,C or G
acacaacatattcaccgttccagggtttagcatttgggcatcttttgtgggggtgggccttacttatactgcttaacacatacactattattctcctaaatgtgatatatatgtgataatgcaaaacaaggaataaatttagaattcatataccagctttactccaggatttgacactggttagctgagtactactgggcaagttacctgatgtctttgggtatcaagtttctgagaaatttaaattagatgacctctgagattccttttgactcatacacattctcctaacactttgcacatttttgttctatttctacagataatctatgacttacaatgccacaatttttctactttacaatgatgcagaagcaatatgcattcggtacactcctcaacttacattggggttacatctgataaacccagcataggtggaaaatgtcacatcaattatgatgggttatcaggatataaccccattgtaagttgaggagtatctgtgtatattaatagatactatataccttatctacttctaaaaagcaaatgtgttaaatcatgtgtcaaatgtcttttactacagagtattatgataggtaatgtatacaatcgaacacactaaaatgggacccattctagaggttttagtctgtggcagcgtttctcagcctcaccactattgatattttgggctgagagattctcctttgtgaggatgtgtcttgttaattgcaggatgtttagcagcatccctggcctctactcaccagatgctagtaggatctttccaattgagccaatcaaaatttttgttagaaaattgctgcaagtcccctatgtggcaaatcacaactagtggtaaatgcagatatatttagttagatacaaagatcaaatagatcattgagcaaagactgaagaaaaaatatgaaaaattattttgtttatacataggtaaaggaaagagtgcagttagtgtgagtggcaggatttgctcccttagagaaaattttgtcagaggaaaaagtgaccaaggtggtatcaatatcaggaaagtttcataaaagatacagaatgtttgttttcattttacttaaagaaaagagagctttataaaatagtaggaacttgatgttctggtcgcctagtgtggtttaggtgatggttttgagagattgcaggtaagtaattgaagtccctgttaaaacagcacagtgacttaagagatgagtataagaagaggaaatgggaaaagatggtaatctgggttccctggtggaggtctccagagcaggaagacatcttgctgtcctagtttttataaacagaagagcagtgatgatggagcagtgcttggggatccattttgagcaaagcattgagtggatatgaggagggggctaagctgagaaatgaagaacaggtaacatgatggtttgactaagagatgaccagggcttttagagaaaaatagtagaaatagcaagagactattaatcatagcttacatttagtacttagttcttactatgttcaaggcagtcttctaagcacttcacatgtattaacttattttattttcacaacaatgtgtgaggtgttattatacccatagagatgaggctggtgaggtatggagatattaagtattttgcttaaagtcttgtttatatggcagagtcaggatttgaacccagcaatccaactctagggcctgtgcccagtgtctgtattaaaaattgatttttacaccctggtgacatccgatataatgctgactttttagaggatgtttattttatttataatttattcatagcctatttctaaaatatgaggaagctacaggcacttgataagtatacattgccctggtatgggacatatttagactgaatcccttaagccaaaattagaggtcacttcaaataataatcataggcttgaaagaaaaattatagatcatctaattttgtggttgaatctattttaaagtattaattaattcatttaggatttttaaaccagctgttatttgtaagccactttgtgaaagttagaggagcacacagttatcatagtgattgaaaacttgaagactttgcctctgggtctaaatcctggctctaccatttacccattagctatgggacctgttggaattacttaaattctttgttcctcacttttaaatgtcaataatagtattcctggtgttgttgcaagtgttacataaaacaatatatgaaagtgcttagcacagtgcatagtgtgtcataaacttagtaggagttagttctttttattttgtaagtctgctgcttgtacatctcattatctgtcatagaatacattatgtccgatctataatttaatcacagaaaaattaaaatgtgagatttaaaacttatcagatacagtgttagtgcagagaaaatataaagttaacaatgatgatgaaacttttaaagtcttagcattttattttaaaatatctgcccattgtagtcttttgctttcttgataccattttgataggtctgactcttttttaatgttctgagatatgtaagattttgtatatattggatgtcttcccaactctgttgagctgtttcctttatagacaaagaccatgggatcttatttctcagcttctcaaaataaaatttaggtaaattcactgaaatgccaaggaaaaacttaagagatgctgtagtagttaaagctgtactgtccaatatgtagtgtttggcagcatgtggctatttaatcttggaatatggccagtccaaattcagaggtactgtaaatttaaaatgtatgtgaaatttcaaagagttagtatgaaaaaaattaatgtaaccacttcaataattttatagtaattatatgtgaaataatgcttttgatatattgggttaaataaaatacattattaaaattatcttacatgtttctgtttactttttaaatgtggctactagaaaattcaaaactgcatgtgtggctcacgttatagttttattggacattgatggtttagagaatcacaagatatattagsatatctgaggctttaaaatacactgcaataaagaaagctgcttaacttaaaaagaacttatttgacaaagtggtttgattacagaacatctattaagctctaatgatataaggttctgaggattaatttttaggaaattaaagtctggaagaaacacgtaaataaacctagaattccttttgcttgccctaattaagttgaatatgaaatgtttttttttcctcttaaaactccaaacatttcaacttcccaatgttatttttattggttagtaagaattaggttgagaatagtatttttgttttttggtttcctattttttgagagattaaattccatggagaataaattatatatttattatggagtctattttcagttagttgaaccttctagctcttaaccagaaagctgcactctttcataatgatttaagcattgctgtagatcctctacctttttctgagtgcaagctttcctcctctcggcctagactaccatgatttcctactaattagcttcctgctgccatttttgccttgctctaatttatatcccatatttcaaaattatatttttaaacaaaaaacaagccctgttgctttcctgcttaaaattcttcagtggcttcccattgaatttaggtaaaaaaccctaaaatctctagtatgacctacatgatcatcagtctgttcccctttcttttttgatcccagaatctcagtctggctttcctcagttactccaatcctttttcatttccaggacttccatacactttgctatttggaaaggcctttaccaaactcttgtgaagattccaggccttccctcttgatcagattggcaattgtccagaccaatatatttttctttgtcttggtgagacatagttcattcctaagcaagggttcttcagtccaggaaaccacatcccatttcactgccatcccagtaactagtgcttcacttctcacatcttcctttttcttccaaagtcttattccatatcttcattagtttcttgtctaagacttcatagatactagttactctctggggtccctgaagcaatagtattaaccctcacacaaatcagtaaatgtgagtagtagttggttagacggatcagtcatggtagatttttgtgtattttaatgtagcagataggagattcaagctttttttctctcaagcttgagaatacagagggcataggtctggcttaccttgtaaaaaatgccagcagctaacaatgaaattctacccaacacaggctgggtatttctctgattttttgccttgggtttacagtattcctagagttaccagaaaactatagtggacaattagcggtggatgccaagagaatgcttggaactttgagaatgttggggtggacattaatcaattgatataagctttgggtatggaggacaacgttatgttataatcattagaagaaatttcaaaggcgataaagaaaaactatttcagaaacgctcttccctgaaacaccaagaaagtgacctattatgttaatatttttgttatatgcaatgtgccctgttagttttgttagaaaatgtacattttattatatccattttcaaatcgtttctggtagtggggttttaaaatgataaatgaggttcaaaattaattccagcctcctttcttttagaaacagtgttagattgaatctgcatcaggcgtgttttcacatgcttggcttcataatctctcttcctccccctatattgtttgcctggaatctgcactaaagataaggcagagtgcaaacctgactcattggcaaccaatcagaagaactttatgtggaaaactcccttcgaggaggtacaggcagcatgaacaaaatttttgaaaaagtggaagcaaaggtagaaaaatatggttgaaatggctaaaacaattggtacttgttttaaaactatatttcatttctgatatgaaaccttatcttttcttttaaagaaacacctaacaaaatatttatcagatcagcaccacagtaaagggaaaaagacattaaaaattaaaaaagataaaataacaaatatttatcagaaatgctcacccttcaaaaaatctggaagattttgattatatatttttccaattatcttctgtttggtaaatttccaagtaattggataaatagtttatatttactttgttttaaaatgactcaaattttcaattagagcataagctttcaaaaacaatctggtcaactagcagacttttagcaaataagacatatttcagaaacagaaaattaattgttatattatttatgatagttatacctaaaacctaggtgttgttaaatatttacatgtttaacacccaagtatacttagagatcatttattgtactcagtgatttctaacaacatgattattttggaacttgaacctatactatttgttttcatttttttgaaactttaggagaataactttattttaaacctctatttttcaatatcagaaccagaacaacctgagaaacttagagccttcaatatttccacacattccttttctctgcactggagcctaccctctggtcatgtggaaaggtatcaagtggatcttgttcctgacagtggctttgttactatcagagatcttggaggtggagaatatcaggtatagttttcattattgtacttgccgagcctacttgtatttatattttgctcctaataggaaagttctttattttatgaaacccatctaccacaaaaacttactccttgttgggtttttgaaagcataagttgaagacaaaaacgttgatgtcaaactgatgagtgttaagtttcagcattggtggactgttaccttagcaacatctatgctgctttttttttttttttttttttttaagttcaccctgaacctacagccagtcatccaagggttcatgaatagtttaacaaagaaaaggcagagctattgagtaatacgggctcattaattgtgtacttgccagaaggatctgtctttaaatcattaatgcaggcaacatttctctctagagccatcaatgtgattctactggctgaaaaatgtaataaagatggattttcttatcatttttcttttactttttattgggacttcagagacacaggtatttcgtatacactctttaaaaacaagggctaagtcatgggctgtagatttctcaagacttgaatagttgttccttgtgacagtgaactaggatagatagaaatgctgacttaggctgtgataacgcagtacgttttgtaagtttttattttaaagtcatttggtaaaaagttatataacatatttgtatcttacaataatatggaacttattgtgatgttataaacagtgcagagttatatagtgaagagttaatttttgttatagtgatagatttattttagcttgcttgctttccagaaagaattttaatgcaactatttgtttgtggtgttctaggttgatgtttccaatgtcgttcctggtactaggtacgatataaccatctcttcaatttctacaacatacacctcacctgttactagaatagtgacaacaaatgtaacaagtgagtatatgttttaaattactttgtaagtaaagtatttggagtcagtataattctactggatggaaatacttatactggcaacatgtacattaaattcatgaaaacagtgtagaataaggcaaaatggaaacaagaaagtgatctgcttagaacctgcattctgctgtttcttcagcttcctttactttcaaagtgcaaagataattactctatacttgtttgtgaaatagatcagagagactgttaatgctaacatttaaataatacagaaccatgaaaatgaactggctacatttgctcaggaaggattattccatttgtaagattatttcttgttttcttagtttttctgtgtaagccttgcgtaagtgaatttcttttaaaaatgatttggcaacaaaagtatattcggcatgtagtatttatttagtagcattccatttttcacattcttataaaggaatgcttttggtattccacatagtatttttttaatagtaacagagctgtagggagtgtgaactcatattgctctttggaaatttcaaattttacatttataaayactgttattatgtatttttgtgwaaatgcaataattatttgaccttttaacaaaatggattttttaaaaatagaaccagggcctccagtcttcctagccggggaaagagtcrgatstgctgggattcttctgtcttggaatacaccacctaatccaaatggaaggattatatcttacattgtcaaatataaggaagtttgtccgtggatgcaaacagtatatacacaagtcagatcaaagccagacagtctggaagttcttcttactaatcttaatcctggaacaacatatgaaattaaggtaattattttgtgtatkactacttagtgttcaaacatttcattcattttaaaagtgtgggaggtttttctcaccttgtcaagcctttacagctgaatacagtcagtgactgacaacgttcacagtcatggcctcacacccacctgagattttaaaacttggtaaaatgttattgtgtcttttcatttcaattttatgcatatttatatattacctatttcattttttctatgaatatttttgcatatatttatatacatgtatgaatataatacaatactctaggaaataaaaattatgtaaagttaaagaaggaaaacttaaatgcaaacaagaggccagggtagtttgaatgcaggtatgtaaaccacaggatgttacacagttattaaaaattgacttgcaaactttattctccaaattcctagaaaccacagtaaaaagggcaataaatctgttatacaatttacgtatgaaaattgtataataattgcatatgggagctcaagttttttttttttttggtgctttagactggaaagaaagtcttcgttgaaggattaatagctgcaggactggattttgtaaacttctttccataacagtaaaataataaaagtatacttagtaaaaataattttgccaggttttgagatattgtggtctaagaacatggccttgttctgtatataaaatttagactccaatgaaatgtcttttttttaaattatttttgattcaggggacatgtgtgcaggtttgttacgtgggtatattgtgtaatggtggggtttgggcttctagtatacccatcacccaaatagtaaacattgtacccaataggtaatttttcaatcctcaccctctcctaccctccccatttttgaaatcccgtgtttattatttccattgttatgcccatgtgtactcatagctcccacttgtaagtgagaatgtgtggtatttgattttctatttttgaattatttcacttaggatatgttctccagctccatccatgttgctgcaaagaacatgattttattttttatgcctgcatagtattccatggtgtatatataccacattttctttacccatatgatagatacttaggttgattccatgaccttgctattgtgaataatgctgtaataaacatgagtgatggtgtctttgtgatacaatgatttcttttcctggatagatacatagcagtgagattgctgggttgaatacggtagatctattttcaggtctttgagaaatctccgtactgtttctcatagaggttacatttctagcaacagtgtattagtgttcccttttctctgcatccacactgccatctgtttttttgactttttaatagtagccattctgattggtataagatgatgtctcattgtggttttaatttacatttctttgataattcctaatgttgagcattttttatatacttactggccacttgtgtgtcttcttttgagaaatgtctgtttatgttttttgtccactttttaatggggtttttctccttgtattgttttcattccttgtagattctggatatccatcccttgttggaagcataatttgcaaatattttctccagctctgtaggttttctgtttactctgttaattatttcctttgctgtgcagaagctttttagtttaactaagtcccatttaagtctattttagtttttgttgcatttgcttttgatgtctcagtcataaattatttgcctagtccaatatccagaagagttttacctagtttttcttactagtatttttatagtttcaggttttatatttaagtccttaatccagaatgtgctaatttttgtatatgctgagagctaaggatccagtttcattctcttggatatggccagccagtttccccagcaccatttattgaacagaatatcctttccccattgtttatttttgtcaactttgtcaaaaatcagttggttgtaggtatgtgactttatttctgggttttctattctcttccattaaagtatatctgtatttttctatcagtactgtgctattttagttactatagctttgtagtataattcraagycaggtaatgtgatgcctccagatttgttctttttgcttaggattgctttcattatttgggctcttttttggtttcatatgaactttaggattgctgttctaattctgtgaaaaattacattgctaatttcataagaattgtgttgaatctgtagatttctttgggtggtatggtatgttgattcttccaatccaagagcatggaatgtttttccatttgtttgtgtcatctctaatttatttcatgagtgtcttgtagttctccttgtaaagattttcacctcctttgtaaaatgtattcctagatattttattttttttktggctatcgtaaatgggattgaattcttgatttcattctcagcctgaatgttattggtgtatagaaattccacttatttttgtacactgaatttgtatcccaaaactttattgaaattgtttatcaagtctaggattattatttttgagttgtcgttagagttttctagatatacaattgtgtcatcagtgaacaaagatagtatgcttcctgttttccaatttggatgcctttttaaaattattgtactttaagttttagggtacatgtgcacaatgtgcaggttagttacatatgtatacatgggacatgctggtgtgctgcacccactaactcgtcatctagaattaggtatatctcccaatgctatccctccccactccccccaccccacaacagtccccagagtgtgatgttccccttcctgtgtccatgtgttctcattgttcaattcccacctatgagtgagaatatgcggtacttggttttttgttcttgcgatagtttactgagaatgatgatttccaatttcatcyatgtccctacaaagggcatgaactcatcattttttatggctgcatagtattccatggtgtatatgtgccactttttcttaatccagtctatcattgttggacatttgggttggttccaagtctttgctattgtgaatagtgccgcaataaacatacgtgtgcatgtgtctttatagcagcatgatttatagtcctttgggtatatacccagtaatgggatggctgggtcaaatggtatttctagttctagatccctgaggaatcgccacactgacttccacaatggttgaactagtttacagtcccaccaacagtgtaaaagtgttcctatttctccatatcctctccagcacttgttctttcctgactttttaatgattgccattctaactggtgtgagatggtatctcattgtggttttgatttgcatttctctgatggccagtgatactgagcattttttcatgtgttttttggctgcataaatgtcttcttttgagaagtgtctgttcatgtccttcacccactttttgatggggttgtttgtttttttcttgtaaatttgtttgagttcattgtaggttctggatattagccctttgtcagatgagtaggttgtgaaaattttcccccattttttgggttgcctgttcactctgatggtagtttcttttgctgtgcagaagctctttagtttaatgagatcccatttgtcaattttgtcttttgttgccattgcttttggtgttttagatgtgaagtccttgcccatgcctatgtcctgaatggtaatgcctaggtttacttctagggtttttatggttttaggtctaacatttaagtctttaatccatcttgaattgatttttgtataaggtgtaaggaagggatccagtttcagctttctacatatggctagccagttttcccagcaccatttattaaatagggaatcccttccccattgcttgtttttctcaggtttgtcaaagatcagatagttgtagatatgcggcatgatttcggagggctctgttctgttccattgatctatatctctgttttggtaccagtaccatgctgttttggttactgtagccttatagtatagtttaaagtcaggtagtgtgatgcctccagcttcgttcttttggcttaggattgacttggygatgtgggytcttttttggttccatatgaactttaaagtagttttttccaattctgtgaagaaagtcattggtagcttgatggggatggcatagaatctataaattaccttgggcagtatggtcattttcacgatattcattcttcctacccatgagcatggaatgttcttcttttgtttgtatcctcttttatatttcattgagcagtggtttgtagttctccttgaagaggtccttcacgtcccttgtaaggtggattcctaggtattttattctctttgaatcaattgtgaatgggagttcactcatgatttggctctctgtttgtctgttattggtgtataagaatgcctgtgatttttgtacattgattttgtatcctgagactttgctgaagttgcctatcagcttaaggagattttgggctgagacgatggggttttctagatatacaatcatgtcatcttcaaacagggacaatttgacttcctcttttcctaattgaataccctttatttccttctcctggctaattgccctgggcagaacttccaacactatgttgaataggagtggtgagagagggcatccctgtcttgtgccagttttcaaagggaatgcttctggtttttgcccattcagtatgatattggctgtgggtttgtcatagatagctcttattattttgagatacgtcccatcaatacctaatttattgagagttttcagcatgaagaattgttgaattttgtcaaaggccttttctgcatctattgagataatcatgcggtttttgtctttgattttgtttatgtgctagattacatttattgatttgtgtatattgaaccagccttgcatcccagggatgaagcccacttgatcattgtggataagctttttggtgtgctgctggattccatttgccagtattttactgaggatttttgcatcgatgttcatcaaggatattggtctaaaattctcttttttggttgtgtctctgcctggctttggtatcaggatgatgctggcctcataaaatgagttagggaggattccctctttttctattgattggaatagtttcagaaggaatagtaccagttcctccttgtacctctggtagaattcggctgtgaatccgtctggtcctggactctttttcgttggcaagctatcgcttattgccacaatttcagagcctgttagtggtctattcagagagtcaacttcttcctggtttagtcttgggagggtgtatgtgtcgaggaatttatccattccttctagattttctagtttatttgcatagaggtgtttgtagtattctctgatggtagtttgtatttctgtgggatcagtggtaatatcccctttatcattttttattgcatctatttgattcttctctcttttcttctttattagtcttgctagcggtctgtcaattttgttgatcctttcaaaaaaccagctcctggattcattaattttttgaagggttttttgtgtctctatgtccttcagttctgctctgattttagttatttctcgccttctgctagcttatgaatgtgtttgnnnnnnnnnnnnnnnnnnnnnnnnnnnnnnnnnnnnnnnnnnnnnnnnnnnnnnnnnnnnnnnnnnnnnnnnnnnnnnnnnnnnnnnnnnnnnnnnnnnnnnnnnnnnnnnnnnnnnnnnnnnnnnnnnnnnnnnnnnnnnnnnnnnnnnnnnnnnnnnnnnnnnnnnnnnnnnnnnnnnnnnnnnnnnnnnnnnnnnnnnnnnnnnnnnnnnnnnnnnnnnnnnnnnnnnnnnnnnnnnnnnnnnnnnnnnnnnnnnnnnnnnnnnnnnnnnnnnnnnnnnnnnnnnnnnnnnnnnnnnnnnnnnnnnnnnnnnnnnnnnnnnnnnnnnnnnnnnnnnnnnnnnnnnnnnnnnnnnnnnnnnnnnnnnnnnnnnnnnnnnnnnnnnnnnnnnnnnnnnnnnnnnnnnnnnnnnnnnnnnnnnnnnnnnnnnnnnnnnnnnnnnnnnnnnnnnnnnnnnnnnnnnnnnnnnnnnnnnnnnnnnnnnnnnnnnnnnnnnnnnnnnnnnnnnnnnnnnnnnnnnnnnnnnnnnnnnnnnnnnnnnnnnnnnnnnnnnnnnnnnnnnnnnnnnnnnnnnnnnnnnnnnnnnnnnnnnnnnnnnnnnnnnnnnnnnnnnnnnnnnnnnnnnnnnnnnnnnnnnnnnnnnnnnnnnnnnnnnnnnnnnnnnnnnnnnnnnnnnnnnnnnnnnnnnnnnnnnnnnnnnnnnnnnnnnnnnnnnnnnnnnnnnnnnnnnnnnnnnnnnnnnnnnnnnnnnnnnnnnnnnnnnnnnnnnnnnnnnnnnnnnnnnnnnnnnnnnnnnnnnnnnnnnnnnnnnnnnnnnnnnnnnnnnnnnnnnnnnnnnnnnnnnnnnnnnnnnnnnnnnnnnnnnnnnnnnnnnnnnnnnnnnnnnnnnnnnnnnnnnnnnnnnnnnnnnnnnnnnnnnnnnnnnnnnnnnnnnnnnnnnnnnnnnnnnnnnnnnnnnnnnnnnnnnnnnnnnnnnnnnnnnnnnnnnnnnnnnnnnnnnnnnnnnnnnnnnnnnnnnnnnnnnnnnnnnnnnnnnnnnnnnnnnnnnnnnnnnnnnnnnnnnnnnnnnnnnnnnnnnnnnnnnnnnnnnnnnnnnnnnnnnnnnnnnnnnnnnnnnnnnnnnnnnnnnnnnnnnnnnnnnnnnnnnnnnnnnnnnnnnnnnnnnnnnnnnnnnnnnnnnnnnnnnnnnnnnnnnnnnnnnnnnnnnnnnnnnnnnnnnnnnnnnnnnnnnnnnnnnnnnnnnnnnnnnnnnnnnnnnnnnnnnnnnnnnnnnnnnnnnnnnnnnnnnnnnnnnnnnnnnnnnnnnnnnnnnnnnnnnnnnnnnnnnnnnnnnnnnnnnnnnnnnnnnnnnnnnnnnnnnnnnnnnnnnnnnnnnnnnnnnnnnnnnnnnnnnnnnnnnnnnnnnnnnnnnnnnnnnnnnnnnnnnnnnnnnnnnnnnnnnnnnnnnnnnnnnnnnnnnnnnnnnnnnnnnnnnnnnnnnnnnnnnnnnnnnnnnnnnnnnnnnnnnnnnnnnnnnnnnnnnnnnnnnnnnnnnnnnnnnnnnnnnnnnnnnnnnnnnnnnnnnnnnnnnnnnnnnnnnnnnnnnnnnnnnnnnnnnnnnnnnnnnnnnnnnnnnnnnnnnnnnnnnnnnnnnnnnnnnnnnnnnnnnnnnnnnnnnnnnnnnnnnnnnnnnnnnnnnnnnnnnnnnnnnnnnnnnnnnnnnnnnnnnnnnnnnnnnnnnnnnnnnnnnnnnnnnnnnnnnnnnnnnnnnnnnnnnnnnnnnnnnnnnnnnnnnnnnnnnnnnnnnnnnnnnnnnnnnnnnnnnnnnnnnnnnnnnnnnnnnnnnnnnnnnnnnnnnnnnnnnnnnnnnnnnnnnnnnnnnnnnnnnnnnnnnnnnnnnnnnnnnnnnnnnnnnnnnnnnnnnnnnnnnnnnnnnnnnnnnnnnnnnnnnnnnnnnnnnnnnnnnnnnnnnnnnnnnnnnnnnnnnnnnnnnnnnnnnnnnnnnnnnnnnnnnnnnnnnnnnnnnnnnnnnnnnnnnnnnnnnnnnnnnnnnnnnnnnnnnnnnnnnnnnnnnnnnnnnnnnnnnnnnnnnnnnnnnnnnnnnnnnnnnnnnnnnnnnnnnnnnnnnnnnnnnnnnnnnnnnnnnnnnnnnnnnnnnnnnnnnnnnnnnnnnnnnnnnnnnnnnnnnnnnnnnnnnnnnnnnnnnnnnnnnnnnnnnnnnnnnnnnnnnnnnnnnnnnnnnnnnnnnnnnnnnnnnnnnnnnnnnnnnnnnnnnnnnnnnnnnnnnnnnnnnnnnnnnnnnnnnnnnnnnnnnnnnnnnnnnnnnnnnnnnnnnnnnnnnnnnnnnnnnnnnnnnnnnnnnnnnnnnnnnnnnnnnnnnnnnnnnnnnnnnnnnnnnnnnnnnnnnnnnnnnnnnnnnnnnnnnnnnnnnnnnnnnnnnnnnnnnnnnnnnnnnnnnnnnnnnnnnnnnnnnnnnnnnnnnnnnnnnnnnnnnnnnnnnnnnnnnnnnnnnnnnnnnnnnnnnnnnnnnnnnnnnnnnnnnnnnnnnnnnnnnnnnnnnnnnnnnnnnnnnnnnnnnnnnnnnnnnnnnnnnnnnnnnnnnnnnnnnnnnnnnnnnnnnnnnnnnnnnnnnnnnnnnnnnnnnnnnnnnnnnnnnnnnnnnnnnnnnnnnnnnnnnnnnnnnnnnnnnnnnnnnnnnnnnnnnnnnnnnnnnnnnnnnnnnnnnnnnnnnnnnnnnnnnnnnnnnnnnnnnnnnnnnnnnnnnnnnnnnnnnnnnnnnnnnnnnnnnnnnnnnnnnnnnnnnnnnnnnnnnnnnnnnnnnnnnnnnnnnnnnnnnnnnnnnnnnnnnnnnnnnnnnnnnnnnnnnnnnnnnnnnnnnnnnnnnnnnnnnnnnnnnnnnnnnnnnnnnnnnnnnnnnnnnnnnnnnnnnnnnnnnnnnnnnnnnnnnnnnnnnnnnnnnnnnnnnnnnnnnnnnnnnnnnnnnnnnnnnnnnnnnnnnnnnnnnnnnnnnnnnnnnnnnnnnnnnnnnnnnnnnnnnnnnnnnnnnnnnnnnnnnnnnnnnnnnnnnnnnnnnnnnnnnnnnnnnctttttgtttgtctgtgccctgcccccatagtggagcctacagagcaggcaggcctccttgagctgtggtgggctccacccagttggagcttccaggctgctttgtttacctaagcaagcctgggcaatggcgggtgcccctcacccagcctcgctgccaccttgcagtttgatctcagactgctgtgctagcaatcaggcagactccgtgggggtaggaccccctgagccatgtgcaggatataatctcctggtgtgccgttttttaagcccgtcggaaaagcgcagtattcgggtgggagtgactggattttccaggtgccatctgtcacccctttctttgactaggaaagggaactccctgaccccttgtgctycccaagtgaggcaatgcctcgccctgcttcggctctctcacggcgcactgcaygcactgacctgcatccactgtctggcactccctagtgagacgaacgggtaccttagatgaaaatgcggaaatggatgccttttatttctttctcttgcttgatcgctctggctaggccttccagtactgtgttcaataggattggtgagagtagacatcctacttttgttgcatttcttagggataatcctttaaacttttctccgtttaggattatgttggctgtggtttgtcatatatagctcttattattttgacatatgttcctttgatgcctactttgttgagggtttttatcatgaagggatattggattttattaaatgcttttcctgcatctgttgagacgatcatatggctaacagggctgggagaaaaatattgaaaaaaaaactttaagtttaataaaaaagtagaatatttttacttaaaaaacttataaaggcgaaattatttaattcaaacttaatttattttccaaaaaagtcactaagctaaagcttttaaaaacagatagcttcggctgggtgcagtgcctcatgcctgtaatcccagcactttgggaggccgaggcgggcggatcacctgaggagttcaagaccagcctggccaatrtggcgaaatcccatctctactcaaaatacaagaaattagctgggcatggtggcragtgcctgtaatcccagctactctgggggttgaggcaggagagtcacttgaacccgggaggcagaggttgcagtgagctgagatcatgccattgcactccagcctggacaacaagaacaaaacgccgccaaacaaaacaaaacaaacaaacaaaaaaacagatagcttttgctctttgcacattgtactttataaagtgtctttatagagtatcgtttatactttatgaaattgataactttggttaattatttaaaaaaactttagcttagtgactttttcaaaaataaatcaagtttaaattaaataatttagcccttataactgaaaatatttcattttaaaataaaacttatagttagcttttcatttttcttccaaatcttcttgtttttacatgtctgttgacattttggatattggtttgaacatttctaaagtgccacttttgctaagaatcgtgaactcaatgtaattactttcaacaaatatttcttgaacatttactatttcttttgcatttataaaaaagtctcgtcctttacatagttgtttttttttttttgagatggactctcgctctgtcgcccaggctggagtgcagtggcccgatctcggctcactgcaagctcygcctcccaggttcacgccattctcctgcctcagcctcccaaatagctgggactagaggcgcccgccaccatgcccggctaattttttcgtattttatttttttttagcagagacgggtttcactatgttggtcagactggtctcgaactcctgacctcgtgattcgcccacttctgccttccaaagtgctgggattacaggtgtgagccaccgcgcccagccgtcctttacatagttaatatgtaaaatttaacatcatctcatttgaatactacagaaagatgagcttataaaaagcagtgctaaattaggccacaggaaaatgcttccagttaagggatawgtatgacatttccaagggataataaagggtaaagatatcttctggatcctccctcaatataacatcaatatcttctttgaaccttgaaaataattaaatagagagaagaaaatatataaaacctgtgtaaatatgtgattttatataaatgagatgttcttcctagaggataagaaatattggaagagatttttgccaggaagttttttcttactggaagtgtgcctatttgcagaattaaagaacacgatcagaactggaaagcaaatactaatagtgtgagtcttacaatgagaaaagaaaaaaaattcttacctatgtagaagtcaaaataaaagatttgtgatgactatttcatgaagaaaacatagcttaaagaataggcaacctttttctaactgacatctgagtattatataatataggtattttctgtcaatatgtacacattcagattaattaacatgtcaatatatgctattggggataattaaaaatttttaatgtgytgtaagaaactattgctgataggaaggtgatttagtcaacctagttctgcttagatctatttttatggagcttgaatttttattcctgtgaattctcttatttaaggtctattgggaagcccttactctccgtttcatctcacactttataaatcattcttgtgacctttactctgttcaaataaatgttagccattgcagaattccaaagggtatttggcatgrtacatttgatgtcttcagtgtaagtaatgttataggaaaaatcctgttaagtattttacatgtgctatttcatttagtcctcagcacaatcctataacatagatacattattattcccattttaaagacaagataaatgttacttacaacagttaagtraattgctcaaagctactatctgggaattggtagaactacagttaagccaaggttatgattccagtcatggcatttgcaaaagcttgagtcttattctcattaatgacattttctttttctattctagtctattggaagatattattcaaatcaaatttttttatctttaaaattctggaattcttagtttaaattattaattaaatgtacttatctaatttatttttttaaaacagttttttgagtatttgtttgcctgattagattgtgaactctaaattaaggtaccatatacatggtctcttgcatttgttacagaaataattgtaatgtcttttatgtagtggatatatcagagaaagactgagctttcaaaataaacccaactgcaactggattcttgctctaccatttattcctgtgtgaccttgggcaaaggtatttgacctctctcagccagttttctcatctatacaattttgacaataatactttatttgttgattgtatagatatcttcatatttgccttcttccttgagagtattaaaaaagtatctttggcatttatcttatggataagtcaaagttttgttttaaattttagattctcttttttcagggagtaaaatgtttgaacacaatccttttggtctgttctaggttgctgctgaaaacagtgctggcattggagtgtttagtgatccatttctcttccaaactgcagaaagtggtaattttcctgtcatttattttaaattracttagtcatgagtttgtcgtttaaaataataaagaacataaataaaaactgacactaaaatacatataattctcagtagcatggccacttaattagttttagagttctttcggatagctaatttattccttaaaatatatattattctttctgattataagaacagtaaatgttatcttacaaaactttgaaaaaacaagaataaaaaatgaaaattatccatagacttatcatataaaaaatgcttttatcattttggtgcatttctggcttgtctatttcccccattaatatrtatctatatgactatacattaatgaaaataagcttgtgctacatatgcaagtttatatcctgccttttctttttaacatgaagtcataagcttgttataacataagacttttggaaacacggattttaatggttattatattattgggtaacatgcagtcattaccaaaccaatttaagatacctccattcttccaggggcatagaggaaaaatcttgatgtcacctgtggctcttttctctcacagtacacatctaatctatcagtaaatcttaccagcacaatcatcaaagtgtattctgaatctcacactcattgctgacatcctgtccaacattattcccaagaattgttgcattatattttatttttattagaatgcagctgtcctgaagtcccttaattcctaccttatatcattcatatagacctccttccaaagatctaactttcttatgtaatttatgtggctattacttataaattatattttagcatccttttgtacaatgtaaacctaaactctagttatttggcatcttaatactaggcatctttactatcacttattttttttttatctcagacgttttgtttcattttgatttctttcaaaartgacttgtcatgtttgttttatattctgaaggatcttggtgttttactctatcagttttacacactttaccatgaggttaatgggaataatttcccctaattctagcttcatattggtttcaagccaactcaaatagaactcagattattattattattactctatataattaataattgatagaaaagcataatgaaattctgaagtaagttgattttgaaaatgtaaaatacaataattacaaccaattgcagggtatccacttgatattaggcactagacatttataaacattccagaaatctgctttttggtgaaaatggttgtataattgattcagtttgctatgtttttcatatctaatgaaactacatattccaaaatagttaaggaaataagaaatttatcccaacttgtttgtatattcacaactattgattgaatttttttcatacttatttgaaacgtttcatcaatgcatgtattagcccagttatcctaaagtaaagttgacttgycccaactccagttttttattttaggcaaagttcagttaaatacatttataaaaatcttacacaaatagattttatgcagtgtattatatatttaatttcatgtaccatgaaattatataaatgcaattctaagttttataacaaagttttttccttcccaatctttctcttccccagctccaggaaaagtggtgaatctcacagttgaggcctacaacgcttcagcagttaagctgatttggtatttacctcggcaaccaaatggcaaaattaccagcttcaagattagtgtcaagcatgccagaagtgggatagtagtgaaagatgtctcaatcagagtagaggacattttgactgggaaattgccagaatgcaatgtaagtatcacagaacactttctatgtcttgaaaaatcttagataaatttaattttcatatttctagcatctagatactatatttttaccaaagttttattagttatttgattacttrtggtatcatgttatacrcaacgttttattatttgattacttagggtatcatgtwacacaattggcctcattcaggtagaatacaggaatggtttgagaattcaagagtgagggattaaaatcatttagggaattckgaaaagacttcatcaaaggagtagcatttgtgatacaccatggagcaaggacagatagagattttgtgatggtggcattcccggtggaggatactttataaagccctgaggtggaaaagtgtaagatataattggagaaaatattttacttccatatgacaggagggaagagtacatgtagggtaatagttgaggttaaatttgcagaggtagactgtcattgttgtgcatatctttggtaaagaatttgtcgttactctggtcattgatgataaacctcataatagtaatgctttattatagaataagcatcgtcattttaattatatgataagcataataatgcttttcctaaaatcattttggtaatctctgtgttactattaatgcaaacacagtcaaacagttatttttgctgtaaatactttataaaagtctaaaaatcttctttttcaacttatgatatagttctaatacacgcacacacctaacgtgtgagctagtggcatactactactttttagtacttatgagaaaaaaamgttcattaacagtaagaaagcagcatttgaacatacacaagagtaaaattatttcagctctttggctcttgcactgttaacatgaagcttaaaaattcttacagatgattgtgctgtagttttacctttattttaagccacttgaaattctattcgtaaaggttaaggtataaggaatacaataaatatgtcctcttctaaaactgcagacataaatgggtacaattaaaatctagcaaatttgtctataacttttgcatgttatgtgtgtatgtatagcataaaagaaaamgamatgaattacatgttcttattctyatgttcaccaagagatacaacattatttctctattgatcttattttatttactaggagaatagtgaatcttttttatggagtacagccagcccttctccaacccttggtagagttacacctccatcgcgtaccacacattcatcaagcacgttgacacagaatgagatcagctctgtgtggaaagagcctatcagttttgtagtgacacacttgagaccttatacaacatatctttttgaagtttcagctgytacaactgaagcaggttatattgatagtacgattgtcagaacaccagaatcaggtatggttcactttttgtagataaaaagatttaaatgattagagaataatgtttaatttatgtagatatttaattttaatcttctttacctttcagtaacttttttcccctaataatataccataggcatcccatcaagggtttcttcgaatttctatactcttttatattatagcacaaaataagtatttgaaaggagaaagatttgcaaraaacaattcttgagccactgaccgtgatcctcatatagcttttatcattttataatgtcagcaatttttagtaatcatctttgccgttctaaatgatttataatcatttacacccttctctcactgttattgccatcmtcaaaagcagaaatacctgcactagcagaacgagcatgtgatcaacatttagttatcagatacaagcagtagctaaaatatatacctacttatatcccatttgcactgcagtttcctcatctgaaaaatagagacagtaatagtaccttccttagggtgccagtgttaaaattaaatgagaataattagatattatcattactactgaattttatgagaacatatttttggtaaggtattcatatatttaattatggtactatatcagtattcatgtaaatacatgtatttatgtatttcatatatttataaaatttaagggatattgatatagtcccacattacataaggtatttattatatatataatatatatagctgacagatatatcataatatagtatcaggcattaggttgtaattgctaatttctgaggtattgaaaattattggtagggtaatttcactaaagcatgttttttctgataaaatagctgttggcttctattatttttcatttcatataagtttgaagtttttttgttcatttaaataaccatctttgaattataccattttcttcttacatactccttactttttatacaataaaaaaatgatttcggggggagccaagatggccgaataggaacagctccggtctacagctcccagcatgagcgatgcagaagacgggtgatttctgcatttccatctgaggtaccgggttcatctcactagggagtgccagacagtgggtgcaggacagtgggtgcagcgcaccgtgcgtgagccgaagcagggcgaggcattgcctcactcgggaagcgcaaggggtcagggagttccctttcctagtcaaagaaaggggtgacagatggcacctggaaaatccagtcactcccacccgaatactgcgcttttccgacgggcttaaaaaacggcacaccaggagattatatcctgcacatggctcagggggtcctacccccacggagtctgcctgattgctagcacagcagtctgagatcaaactgcaaggtggcagcgaggctgggtgaggggcacccgccattgcccaggcttgcttaggtaaacaaagcagcctggaagctccaactgggtggagcccaccacagctcaaggaggcctgcctgcctctgtaggctccacctctgggggcagggcacagacaaacaaaaagacagcagtaacctctgcagacttaaatgtccctgtctgacagctttgaagagagcagtggttctcccagcacacagctggagatctgagaacgggcagactgcctcctcaagtgggtccctgacccctgaccgccgagcagcctaactgggaggcaccccccagtagaggcagactgacacctcacaaggccgggtactcctctgagacaaaacttccagaggaatgatcagacagcagcatttgcggttcacgaaaatccactgttctgcagccaccgctgctggtacccaggctaacagggtctggagtagacctctagcaaactccaacagacctgcagcggagggtcctgtctgttaggaggaaaactaacaaacagaaaggacatccacaccaaaaacccatctgtacatcaccatcatcaaagaccaaaagtagataaaaccacaaagatggggaaaaaacagagcagaaaaactggaaactctaaaaagcagagcacctctcctcctccaaaggaacgcagttcctcaccagcaacagaacaaagctggacagagaatgactttcacgagttgagagaagaaggcttcggacgatcaaactactccgagctacaggaggaaattcaaaccaaaggcaaagaagttgaaaactatgaaaaaaatgtagacgaatgtataactagaataacgaatatagagaagtgcttaaaggagctgatggagctgaaagccaaggctcgaaaactacgtgaagaatgcagaagcctcaggagccgatgcgatcaactggaagaaagggtatcagtgatggaagatgaaatgaatgaaatgaagtgagaagggaagtttagagaaaaaagaataaaaagaaatgaacaaagcctccaagaaatacgggactatgtgaaaagaccaaatctacgtatgattggtatacctgaaagtgatggggagaatgaaaccaagttggaaaacactgtgcaggatattatccaggagaacttccccaatccagcaaggcaggtcaacattcacattcaggaaatacagagaacgctacaaagatactcctcgagaagagcaactccaagacacataattgtcagattcaccaaagttgaaatgaaggaaaaaatgttaagggcagccagagagaaaggtcgggttacccacaaagggaagcctattagactaacagcggatctctcagtagaaactctagaagccagaagagagtgggggccaatattcaacattcttaaagaaaagaattttcaacccagaatttcatatccagccaaactaagcttcataagtgaaggagaaataaaatacctttacagacaagcaaatgctgagagattttgtcaccaccaggcctgccctaaaagagctcctgaaggaagcactaaacatggaaaggaacaactggtaccagccgctgcaaaatcatgccaaaatgtaaagaccatcgagactaggaagaaactgcatcaactaacgagcaaaataaaccagctaacatcatactgacaggttcaaattcacacataacaatattaactttaaatgtaaatggactaaatgctccaattaaaagacacagactggcaaattagataaagagtcaagacccatcagtgtgttgtattcaggaaacccatctcacatgcagagacacacataggctcaaaataaaaggatggaggaagatctaccaagcaaatggaaaacaaacaaaggcaggggttgcaatcctagtctctgataaaacagactttaaaccaacaaagatcaaaagagacaaagaaggccattacataatggtaaagggatcaattcaacaagaagagctaactatcctaaatatatatgcacccaatacaggagcacccagattcataaagcaagtcctgagtgacctacaaagagacttagactcccatacaataataatgggagactttaacaccccactgtcaacattagacagaaagttaacaaggatacccaggaattgaactcagctttgcaccaagcggacctaatagacatctacggaattctccaccccaaatcaacagaatatacattttttcagcaccacaccacacctattccaaaattgaccacatagttggaagtaaagctctcctcagcaaatgtaaaagaacagaaattataacaaactgtctctgagaccacagtgcaatcaaactagaactcaggattaagaaactcactgaaaaccgctcaactacatggaaactgaacaacggctcccgaatgactactgggtacctaacaaaatgaaggcagaaataaagatgttctttgaaaccaacgagaacaaagacacaacataccagtatcactgggacgcattcaaascagtgtgtagagggcaatttatagcactaaatgcccacaagagaaagcaggaaagatccaaaactgacaccctaacatcacaattaaaagaactagaaaagcaagagcaaacacattcataagctagcagaaggcaagaaataactaaaatcagagcagaactgaaggacatagagacacaaaaaacccttcaaaaaattaatgaatccaggagctggttttttgaaaggatcaacaaaattgacagaccgctagcaagactaataaagaagaaaagagagaagaatcaaatagatgcaataaaaaatgataaaggggatattaccactgatcccacagaaatacaaactaccatcagagaatactacaaacacctctatgcaaataaactagaaaatctagaagaaatggataaatttttcgacacatacaccctcccaagactaaaccaggaagaagttgactctctgaatagaccactaacaggctctgaaattgtggcaataagcaatagcttamcaaccaaaaagagtccaggaccagatggattcacagccgaattctaccagaggtacaaggaggaactggtaccattccttctgaaactattccaatcaatagaaaaagagggaatcctccctaactcattttatgaggccagcatcatcctgataccaaagccgggtagagacacaaccaaaaaagagaattttagaccaatatccttgatgaacatcgatgcaaaaatcctcagtaaaatactggcaaatggaatccagcagcacaccaaaaagcttatccaccatgatcaagtgggcttcatccctgggatgcaaggctggttcaatatacacaaatcaataaatgtaatccagcatataaacagaaccaaagacaaaaaccacatgattatctcaatagatgcagaaaaggcctttgacaaaattcaacaaccctccatgctaaaaaccctcaataaattaggaattggtgggaygtatctcaaaataataagagctatctatgacaaacccacagccaatatcatactgaatgggcaaaaactggaagcattccctttgaaaactggcacaagwcagggatgccccctctcaccactcctattcaacatagtgttggaagttctggccagggcaattaggcaggagaaggaagtaaacggtattcaattaggaaaagaggaagtcaaaatgtccctgtttgcagacgacatgattgtgtatctagaaaaccccatcgtctcagcccaaaatctccttaagctgataagcaatttcagcaaagtctcaggatacaaaatcaatgtacaaaaatcataggcattcttatacaccaacaacagacaaacagagagccaaatcatgagtgaactcccattcacagttgcttcaaagagaataaaatacctaggaatccaacttacaagggatgtgaaggacctcttcaaggagaagtacaaaccagtgctcaatgaaataaaagaggatacaaacaaatgraagaacattccatgctcatgggtaggaagaatcaatatcatgaaaatggccacactgcccaaggtaatttatagattctatgccatccccatcaagctaccaatgactttcttcacagaattggaaaaaactactttaaagttcatatggaaccaaaaaggagcccgcattgccaagtcaatcctaagcsaaaagaacaaagctggaggcatcacactacctgactttaaactatactacaaggctacagtaaccaaaacagaatggtactggtaccaaaacagagatatagatcagtggaacagaacagagccctctgaaataacgctgcatatctacaactatctgatctttgacaaacctgagaaaaacaagcaatgtggaaaggattccctatttaataaatggtgctgggaaaactggctagccatatgtagaaagctgaaactggatcccttccttataccttatacaaaaatcaattcaagatrgattaaagacttaaatgttagacctaaaaccataaaaaccctagaagtaaacctaggcattaccattcaggacataggcatgggcaaggacttcatgtctaaaacaccaaaagcagtggcaacaaaagccaaaattgacaaatgggatctaattaaactaaagagcgtctgcatagcaaaagaaactaccatcagagtgaacaggcaaccttcagaatgggagaaaattttcacaacctactcatctgacaaagggctaatatccagaatctacaatgaactcaaacaaatttacaagaaaaagcaaagaaccccatcaaaaagtgggcgaaggacatgaacagacacttctcaaaagaagacatttatgcagccaaaaaacacatgaaaagatgctcaccatcactggccatcagakaaatgcaaatcaaaaccacaatgagataccatctcacaccagttagaatggcaatcattaaaaagtcaggaaacaacaggtgctggagaagatgtggagaaataggaacatttttacactgttggtgggactgtaaactagttcaaccattgtggaagtcagtgtggcgattcctcagggatctagaactagaaataccatttgacccagccatcccattactgggtatatacccaaaggactataaaacatgctgctataaagacacatgcacacatatgtttattgcggcattattcacaatagcaaagacttgcaaccaacccaaatgtccaacaatgatagactggattaagaaaaygtggcacatatacaccatggaatactatgcagccataaaaaatgatgagttcatgtcctctgtagggacatggatgaaattggaaatcatcattctcagtaaactatcacaagaacaaaaaaccaaacaccgcatattctcactcataggtgggaattgaacaatgagaacacatggacacaggaaggggaacatcacactctggggactgttgtgggktgggggcagggggkaggtatagctttaggagttatacctaatgctaaatgacgagttaatgggtgcagcaaaccaacatggcacatgtatacatatgtaactaacctgcacgttgtgcacatgtaccctaaaacttaaagtgtaataataataaaatttttaaaacaatgatttcataagggtcatacaaggtgaaatttgctagacaataattttgttttgaaaaatatttggaattgttttatttcaattaaaagaataaacatctaagaaaaatagagtaatttaaaatgtcattattattttcatgttatcaatattacatttgaatcctccaaatgtagattataaatttgttcttagaataaatacaaatattgatacaaaaagtaaaaattatttgctcataattttgagggtcattttcttgaaacttctacctgtgttaataagagagaaaatgtttatcaagccagatatccagactttgttcatccagactttgttgaatgcagtatatatatgcaggtataaatgtttcaagacaatgtaacattggcaataaatgtattacaatgaatattagaatgaaacttgcgcagtgcaatagtaaacagtattaaataaaatcagtaattgttaaaaataagtttatctgatgatccagcatgtgttattcacaattttcaattatattccatttattcttttttaagataaaaaaactctgcttttaagcgcgatattttattttccttctttgcctttgtgttttattatgtgtatttaatagggtgcgctttcattttaaatatatgttatgtatttwttttctataattattttagtgcctgaaggaccaccacaaaactgcgtaacaggcaacatcacaggaaagtccttttcaattttatgggacccaccaactatagtaacagggaaatttagttatagagttgaattatatggaccatcaggtaagccttaattggttttgtgtttgccttttggagtgagaataataaaatatgttaccaatatcaaactctgtttaaaagtatcagactctttttaaaagactytaagattgaagcaaacaataggaaagtcataaggaaggggaggtcctttgattttttaattcaaaaccataaatgagtataagaatgacaaaactattcatgttccacatttcatgtgatgcatgtgaaaaactagagakaactcctcaagaaaaaagtgttagtggagatatacatcttcaaatatttgaacaagaagtccttggcttacattcatgaagaacaatggactttgactatattaaattagatttctattcactgctaggagcctagtttttaatcattagaaagagctctctaaaaataacatggaaaatctctgtatcttctgctctattttgctgtggacctaaaactgctttaaaaaagaaaacctattaaaatttttgggcagctttataaagtggcaagttctccaactttgtaagcaagcaggacctgggcatccacttgccagagatactttgagaggatcaagtattatatcattaggatcaagtattatatcattagaagtgaattatgtaaagtctaaaattctctccygattgagagcctctgattctatgaaakaagtttaattctaacaatgatgagataaataataaagccacatattatcatttatttgggggcatcaaaaaagatacagagttccaactcattttattttgcaatttctgtggtatgaatcactcatcacyatcatgagtaacctttatctttcatccctaagtaacttatgctcctaaaattctgaaatacttttacttcctaaaaaaagataattccctccactcacccatccgatacacagaaacagacatggatacacagctacatcttttctgtctgacattattgttcaatacttggctgaagtactctttcatttgtaaggctggctgataaatcaagtgagaggcatgtagcaataattgcatttagcaacatgggagtgatcacatgctttcagtatggtggaacatgtggggtaaatacatgattgaattagtttaagagtgaatgggagaagatcattggaacaatgggtgtagaaattcttttgagtttagctgcaaagcaaagcagtgaatagagagtaagggtagggataagtgaagtcaacaggtctcttcagtaagaacatataaagcatgtttgtttgctgatggaaatgaggaaaataaggaaaatgttaatgatataagaaaaacgagaattactggaaaggtgtctgtgtgggcagaaggtgagatcttttgctcaaatgtagccattggtttgagataagaatacagataatttgtccatactaacagataatttgtccataagttgttcttataggttgtaaggcagagtatatgggtgtagatgctggtaaatatatagttgtgttggtgggagcctgtggcaaatattttctaactggtttacctttttcagtgtagtgggaagcaagactattagttgggagtgaagatagggcagaaggtattagaggtctgagcagagaagagtaagtgtaaaataatcttctagaagagtagagtgattggaccattgactatgtaagttgagtaagattccaggcaccatgtagggctcattcaaggtttggctatgaataaagtgacatcaattaatggctttgtgctgtaaatgagctgccttcaacaacagaagggcgagggaattggaggcctgtgtaaggcagtgattataattgaaactgacactgaagatgggtagagtggaaatcaagtggtgaggggccaaataaaataaaacaaaaataaaataggtgattaaatcaatggattgttgatttcagtggatttaaagaattatcagttcagaattatagaggaaatgtaaaggaagtaagcaaaagtggttagaaaaaagttgcatgaaattgagattcttaatgatacggagtaattggtgatagtaatgtccaagttatgatcttgagggagtggctgaaattctgaaaaactagattatttaaggaaatatctaagtaatttaaggattaagtctcaggatattaaaatcagcacaaattaagatggtagccttgaaccaaagctagaccaygaaagtaaatgagagtaaatgaccctcaggttagtagattacgacaactgtgagggctagtggatttcactggtgatacagtatttaaagctgtgggcttttataaggagggagagagaatagtaaataaagtggagcaatgaggagcaaggacaacacctaccacacctaaaggcctggttacttgagagctgtggggcaaaaacagactgccaccatttggggtggctgcaggggaacaaaaacagtgttctcaggaaagagccagtttgtagttagagcaagaaggtaaaggaaacatttaaagcaaagtcgaagatttaaagtattgtgctgacagactaaggaattttgttcagaagctaaactagaaatattttctaaatatatcctcttatagaagataatgaaattatttagcatttttttttttttttttttttttttttgagacggagtctygctctgtcgcccaggctggagtgcagtggcgsgatctcggctcactgcaagctccgcctcccgggttcacgccattctcctgcctcagcctcccragtagctgggactacaggcgcccgccactacgcccggctaattttttgtatttttagtagagacggggtttcaccgttttagccgggatggtctcgatctcctgacctcgtgatccgcccgcctcggcctcccaaagttatttagcattttaattgaataaatttgagtataaaatctggtcactttttgaactgataaaatttgatgcttcccttttcaatatgtcaaaaataacctggtaattcaaaaaggctttatgatttaataaaagtcattttaagcactggaacattttcatgttctttcatttattttcattaaattgatatcagtgcactactaagccacatgtttaaaatatatgcagttttgatattataataacaaattttagtgcataggttaacacttgaattgttgtctttggctctgtacttaaatgtgaacatgattgcaygcttgataaaaaataatccatagctatcttccactttttgcaggtcgcattttggataacagcacaaaagacctcaagtttgcattcactaacctaacaccatttacratgtatgatgtctatattgcggctgaaaccagtgcagggastgggcccaagtcaaatatttcagtattcactccaccagatggtaagaacatagggaatgagtgagatatttttggtatgcttatgaacttcatgaattggtaaaacatgatattagaagcaatttgttttacatttacttaaatcatgttatttccttattaaattactacctaattcattctgaacatgtgttctycagaatgttaaactcatagcatgcttcataataaaagggacccaagatcaggtaaggttaggaaatatcatatgtagtattggcctgttagagattcacaataaaatttagcaaaacctcaagaagtcataaggtaaacaaacacatttagtatggtttaactacatttttaaatgtggaatctattttttctcacagaactagtatttagaagaattcctatactcccaattctttcaacaaaatatgtttataatcaaaacgggattctaagcaagtgaagattctgagtggatgtatgatatagatttaccagcatttactgaaattatgaaaacattatttttcctcaagaaacttccttataagtattcattaaacatcattgttttaggtgaactatactttaaaaagaatgtttccatactatttcacaacatatctttcaggcccacactgaacttgctaaatgtcttaatttctatttagggattgtaattatggacaaaaataacagtaaattcttataacacattaacacttggaaaagtttccagactttgtttgtgtggaagctaacatacagtaacttataaatgaaatgtagacatgtatacacacacacacactcacacacacgcrcacacacacacacacacacacacacaggtcatacattcatcgttcaagcgtttgaccattagagggcagtaactattaggaaattttgtacttctaccctttaaagaaacaaccattgatatttttttgaaagaacataaaagttacgttttatctatttcagatgaaaatcctgacatatatatagttttagaatacatataagaaagttgtacatactcataaggaaaatgttctttttttgtattaaaattttacctttgtgtttctatcagaagaatcctagcattgtgtagcttcttccttaaatcttaagttttcctccatctccacctaaaaactgctcttaagcatgtcctaggaaactagacagatttatggacactatcaaataaagcagagcccttgattttggtcttaatagagttttctcaaccaactcaatgtacctattgatttctattcttgttatacaattaaatacatcctgaactattgtcttctttcaagaccagctgattttggtgcttccaaatagaatccacaactcaataaacatatttttattgtcatcattcttggactacakcatgtgacaaaaatagggaaatagataatgcatatgctgtgtacaatgtcatgttatttgtcttggattattttaaaatttacttgccttaatttctacattttttatccacaaaagaagtagaatcttcaggtcatagttcagtatatttcacaaggcctatttttcacaccaaatcattttaagtagatgactccatttgccctctataaaaagcaatttgtcctgtgtttcattctgttatcttcctgagtcactcctcctatagatcacaccctggtgggtcttagaggggcctcctggcaactggtgggttccaccaaaggcagggttggcatggttcttatatcctcatgtcagccttcatccatggagttctcttgggatagttcagccacaggagctgcctcaatggaatactctggcaaatgcagtaaatgtagctttctacttctgacaccactaattaatcctggtttcagtatttaaaactttgaaataaatggatctttaaactatatgaaaacaatgtgataactcattagaactatctttcaatttaaaaatgatttcttaattttatattatccttttcattaatacaacagggtttttagtattctaattaaagttacttaatttaatttcttctccatattttaaaccagtctatcatctatttaaaaaataattaggactagtttgcttcttttaaattaccttttaaaacaattggtgctcttataaatctccagatactcatagaaaaatgttgcattgacctcttatagagaatgttatgtgctattacattacagtggagttgatttcattacccctggggatgttacggtccatagtctactttgaaagaaaatcagcatcctattattttagcagttctcttatgtatttcctaagccctctatatgtctcttaatattttgatgagtagatttctgcataggcatgaaaataaatgattttggaaaaaaaagataataatctccaaagctataaaatgtcatagagttgcctattccaaaatcagataatgctgatgaatataacataggcaacagcattcttctaaattgtgtgaggggtaaaaaaaataagcagactgtgatgcttcaatattgtctaacaacttttctgtcagggtagtttagcatgaccatttcttaaaagcagacaaatttctgagattcttgtttactccctcttaaacagactatggcagtgaagacgtttgtcctcagtgatttaaacttgttactttctgcaaatagtagtaaaatctttgcaggaaaataactgagagcctgccaactttgtgttttcaggatttgcaatggctttaatttttactacttgtttttcaaaatatacttctaaagaaactttaatttgctagataatggcaaaaatgatcttaatgtattttcttttacctcaatgctgtttgtctctatttcatttcttctcatagtttttcatttgaacacttcaaatcatttggaatatattttaataaatcatatgctattgtgtttctaatgcattagtaaaatttataaatatattaactcgagaataattcttaggtagtccatgtatataacaccttcaaaattaaaattattttgccattatctagaaaattcatcatcgagcagcattaattttgaagttggagaaaatggcattggggtaaagaaaatgtgagatttttttggccaaatgtctaacttatttctcatttatttgtaaaatttgtaaatgtatcgacttgagaatgactcttaggtatttcctgtggacatcaccttcaaaactgatgctgaaccatgaataattgagttgtgtgtttgattttctttaggtaattttgtatcaatattaaagtcttctctagtttccccataagaatttgtggtctaacagatcaagtatctttttaaagacaagatacaatgctgttgactccatttcctttatcccctaagcttaaataggaaaaaaaagataagtttatagtcattatttttatgcaagtttgaggtacattttaaggtaatatagaaccacttaatctttacctggattgtaatttttggcattaagtatcatggggcaacacttactaagaaagtaagtattgaatatatagaatatatagaaatatatatgctaattaaaagataaaaaatagtgtctgctactactcttggtttcactagcaaaataagagacagtaaaatatatatagttttctgctgtcctgcataatatttgatatctaacacattagtgtgttgcgttgacttgaactgatcatttcacttatctttcaataggcagggtttagttgcctgattaatatgatcaatgtagtcattagctgttttttttttttcagttgagattctacatcagttcaaaataaatggaaaaagtgccagatctcctctgacttaagttatgcaatactggctattgttttgtctgcataaaaactgcaaaataaaattttaaaaagagatggaataggagctttgctatttaaatagccatgttattttacaccacacaattaattggaaagtttctccacccttgaaaaatgcatattggtaaattgcatattggtaaatatgatgatgcaaacatgagctctaggtacaatatattttagtgaaataaaactcatactagaggtgacctgtgcaaagggctttatctgtcttattccttcctctgtcctcaagtgcctagaacagtgatcatatgatcaatgctcagtgtgttgaatgatgaatgaatggcccaacgattgtcacaatatctagggagtctttaccggttacttcatgaagacaaaggaaaaaactcaatctattggatgaaaactttgtatagtcatagttactataaagccaacttaagcataattatatttgctcattataaataacatatatgggagttataaaattatttttcaattcctttctgttgtcttaaaaagaaagggggtcatttttcctttgttcccttttaagactatatgcctgtcttctaactagaatttgctaaacctgtaccgctgccagagagtttagggaaattaactgaaagtgtaacaacaatctgataataagggatcataattttatgccattttctctttcttaaaagttttagaaatttgagaaattttcttgaactctttgttccttatagtaacctgtatagtaataggaaagctataatgacacccattttatagataaggaaagtagaggttggagggatgcatgagctattcataatcacaagttgaactgtaaataaaaatgatcaaaagcccaggggatatttgttttttgcccgttactcctgtgaaactgggaagttccctagatgtcactcttagtgactttacaactagaacttgctttaagttcttggtactttattttaaaccaattgttagtttgttcctatttttatttactattgcaatgagtgagggcacctgaaatttgaaaataacatgattatttttaaaatatcagaaaaaaatcaatcaactcttcaaacaatttcatgtaataaattaaaacgcagtctaatttaacttaccaactatatttaattgcattcagagtcttctggatattaattttcaatctgttgttataatttttatgaaaccatcaagatttcaactggcattaattatcaccaaataggcagattctcaagaaaattatttttattaattaatttgtttcaaacaaatgttatgacttttattttggaaaattattctgttattctgctccttacttacatttcgagaacaatgtttagaaatttaggcaagatggccgaataggaacagctccagtctacagctcccagcgtgaacgacgcagaagacgggtgatttctgcatttccatctgaggtaccgggttcatctcactagggccagacagtgggcgcaggtcagtgggtgtgcgcaccgtgtgcgagccgaagcagggcgaggcattgcctcactcgggaagcgcaaggggtcagggagttccctttccccttgtcaaagaaaggggtgatggacggcacctggaaaatcgggtcactccgacccgaatactgcgcttttctgacgggcttaaaaaacggcgcaccacgagattatatcccacacctggctcrgagggtcctacgcccacggagtctcgctgattgctagtacagcagtctgagatcaaactgcaaggcggcagcgaagctgggtgaggggcgcccgccattgcccaggcttgcttaggtaaacaaagcagccwggaagctccaactgggtggagcccacaacagctcaaggaggcctgcttgcctctgtaggctccacctctgggggcagggcacagacaaacaaaaagacagcagtaacctctgcagacttaaatgtccctgtctgacagctttgaggagagcagtggttctcccagcacgcagctggagatctgagaaaggggaaactgcctcctcaagtgggtccctgacccctgacccccgagcagcctaactgggaggcatcccccagcaggggcacactgacacctcacatggccaggtactccaacagacctgcagctgagggtcctgtctgttagaaggaaaactaacaaacagaaaggacatccacaccaaaaacccatctgtacatcaccatcatcaaagaccaaaagtagataaaaccacaaagatggggaaaaaacagaacagaaaaactggaaactctaaaaagcagagygcctctcctcctccaaaggaatgcagttcctcaccagcaatggaacaaagctggacggagaacgactttgacgagctgagagaagcttcagacgatcaaattactctgagctacrggaggacattcaaaccaaaggcaaagaagttgaaaactgtgaaaaaaatttagaagaatgtataactagaataaccaatacagagaagtgcttaaaggagctgatggaacttataaccaaggctcgagaactacgtgaagaatgcagaagcctcaggagccgatgcgatcaactggaagaaagggtatcagcaatggaagatgaagtgaatgaaacgaagcgagaagggaagtttagagaaaaatgaataaaaagaaatgagcaaagcctccaagaaatatgggactatgtgaaaagaccaaatctacgtctgattggtgtacctgaaagtgacggggagaatgcaaccaagttggaaaacactctgcaggatattatccaggagaacttccccaatctagcaaggcaggccaacgttcagattcaggaaatacagagaacaccacaaagatactccttgagaagagcaactccaagacacataattgtcagattcaccaaagttgaaatgaaggaaaaaatgttaagggcagccggagagaaaggtcgggttaccctcaaagggaagcccatcagactaacagcagatctctcggcagaaaccctacaagccagaagagagtgggggccaatattcaacattcttaaagaaaagaattttcaacccagaatttcatatccagccaaactaagcttcataagtgaaggagaaataaaatactttacagacaagcaaatgctgagagattttgtcaccaccaggcctgctctaaaagagctcctgaaggaagcactaaacatggaaaggaacaactggtaccagccactgcaaaatcatgccaaaatgtaaagaccatcgagactaggaagaaactgcatcaactaatgagcaaaataaccagctaacatcataatgacaggatcaaattcacacataacaatattaactttaaatgtaaatggactaaatgctccaattaaaagacacagactggcaaattggataaagagtcaagacccatcagtgtgctgtattcaggaaacccatctcacgtgcagagacacacataggctcaaaataaaaggatggaggaagatctaccaagcaaatggagaacaaaaaaaggcaggggttgcaatcctagtctctgataaaacagactttaaaccaataaagatcaaaagagacaaagaaggccattacataatggtaaagggatcaattcaacaagaagagctagcctaaatatatatgcacccaatacaggagcacccagattcataaagcaagtcctgagtgacctacaaagagacttagactcccacacattaataatgggagactttaacaccccactgtcaacattagacagatcaacaagacagaaagtcaacaaggatacccaggaattgaactcagctctgcaccaagtggacctaatagacatctacagaactctccagcccaaatcaagagaatatacatttttttcagcaccacaccacacctattccaaaattgactacatacttggaagtaaagctctcctcagcaaatgtaaaagaacagaaattataacaaactatctctgagaccacagtgcaatcaaactagaactcaggattaagaatctcactcaaaactgctcaacttcatggaaactgaacaacctgctcctgaatgactactgggtacataatgaaatgaaggcagaaataaagatgttctttgaaaccaactagaacaaagacacaacataccagaatatctgggacgcattcaaagcagtgtgtagagggmaatttatagcactaaatgcccacaagagaaagcaggaaagatccaaaattgacagcctaacatcacaattaaaagaactagaaaagcaagarcaaacacattcaaaagctagcagaaggcaagaaataactaaaatcagagcagaactgatggayatagaaacacaaaaaacccttcaaaaaattaatgaatccaggagctggttwtttgaaaggatcaacaaaatacatagaccactagcaagactaataaagaaaaaaagagagaagaatcaaatagacgcaatacaaaatgataaaggggatatcaccaccgatcccacagaaatacaaactaccatcagagaatactacaaacacctctatgcaaataaactagaaaatctagaaggaatgaataaattcctcgacacatacactctcccaagactaaaccaggaagaagttgaatctctgaatagaccaataacaggctctgaaattgtggcartaagcaatagcttaccaaccaaaaagagtccaggaccggatggattcacagccgaattctaccagaggtacaaggaggaactggtaccattccttctgaaaytattccaatcaatagaaaaagagggaatcctccctaactcattttatgaggccagcatcattctgataccaaagccaggcagagacacaaccaaaaaagagaattttagaccaatatccttgatgaacattgatgcaaaaatcctcagtaaaatactggcaaaacgaatccagcagcacatcagaaagcttatccaccatgatcaagtgggcttcatccctgggatgcaaggctggttcaatatattaaaatcaataaacataatccagcatataaacagaaccaaagacaaaaatcacatgattatctcaatagatgcagaaaaggcctttgacaaaattcaacaatccttcatgctaaaaactctcaataaattaggtattgatgggacgtatttcaaaataataagagccatccatgacamacccacagccaatatcatactgaatgggcaaaaactggaagcattccctttgaaaactggcacaagacagggatgccccctctcaccactcctattcaacatagtgttggaagttctgcccagggcaattaggcaggagaaggaaataaagggcattcaattaggaaaagaggaagtcaaattgtccctgyttgcagatgacatgattgtatatctagaaaaccccattgtctcagcccaaaatctccttaatctgataagcaacttcagcaaagtctcaggatacaaaaccaatgtacaaaaatcacaagcattcttatacaccaacaacagacaaacagagagccaaatcatgagtgaactcccattcacagttgcttcaaagagaataaaatacctaggaatccaacttacaagggatgtgaaggacgtcttcaaggagaactacamaccgctgctcaatgaaataaaagaggatacaracaaatggaagaacattccatgctcatgggtaggaagaatcaatatcgtgaaaatggccatactgcccaaggtaatttacagattcaatgccatccccatcaagctaccaatgactttcttcacagaattggaaaaaactactttaaagttcatatggaaccaaaaaagagcccgcatcgccaagtcaatcctaagccaaaagaacaaagctggaggatcacactacctgactttaaactatactacaaggctacagtaaccaaaacagcatggtactggtaccaaaacagagatatagatcaatggaacagaacagagccctcagaaataacgccgcatatctacaactatctgatctttgacaaacctgagaaaaacaagcaatggggaaaggattccttatttaataaatggtgctgggaaaactggctagccatatgtagaaagctgaaactggatcccttccttacaccttatacaaaaattaattcaagatggattaaagacttaaatgtcagacctaaaaccataaaaaccctagaagaaaacctaggcaataccattcaggacataggcatgggcaaggacttcatgtctaaaacaccaaaagcaatggcaacaaaagacaaaattgacaaatgggatctaattaaactaaagagcttctgtacagcaaaagaaactaccatcagagygaacaggcaacctacaaaatgggagaaaattttcacaacctactcatctgacaaagggctaatatccagaatctrcaatgaactcaaacaaatttacaagagaaaaacaaacaaccccatcaaaaagtgggcgaaggacatgaacagacacttctcaaaagaagacatttatgcagccaaaagacacatgaaaaaatgcttatcatcactggccatcagagaaatgcaaatcaaaaccacaatgagatatcatctcacaccagttagaatggcaatcattaaaaagtcaggaaacaacaggtgctggagaggatgtggagaaataggaacacttttacactgttggtgggactgtaaactagttcaaccattgtggaagtcagtgtggcgattcctcagggatctagaactagaaataccatttgacccagccatcccattactgggtatatacccaaaggactataaatcatgctgctataaagacacatgcacacgtatgtttattgtggcactattcacaatagcaaagacttggaaccaatccaaatgtccaacaatgatagactggattaagaaaatgtggcacatatacaccatggaatactatgcagccataaaaaatgatgagttcatgtcctttgtagggacatggatgaaattggaaatcatcattctcagtaaactatcgcaagaacaaaaaaccaaacgccgcatattctcactcatagatgggaattgaacaatgagatcacatggacacaggaaggggaacatcacactctggggcctgttgtggggtggggggaggggggagggatagcattgggagatatacctaatgctagatgacgagttagtgggtgcagcgcaccagcgtggcacatgtatacatatgtaactaacctgcacaatgtgcacatgtaccctaaaacttaaagtataataataaaagaaaaaaaagaaatttagtattaaatatccatgtatttaaagacatttaatttaacaaaaatttattatactttcagttctggggtacatgtgcagaacgtataggtttgttacataggtatacatgtgtcatggtggtttrctgcacccatcaaagtgtcatctacattaggtacttctcctaatgctatccctcccctagccccccacccaccgacaggccccggtgtatgatgttcctctccctgtgtccatgtgttctcattgttcagctccctcttatgagtgtgaacatgcggtgtttggttttttgtccttgtgatagtttgctgagaatgatggtttccagctttatccatgtccctgcaaaggacatgacctcatcctttttttaagacttatttaatttttaacaaaataaattgtttttgtctattttctttctttcttgttttttgtttgtttgtttgtttgtttgtttgttkgttttttgatggagtctygctctttcttccaggctggagtgcagtggtgyaatctccactcactgtaacctccgcctcttgggttcaagcaattctcctgcctcagcctcctgagtagctgggattacaggcacgcaccaccatgcctggctwatttttgtattttttagtagagatggggtttcaccatgttggtcaggctggtctcgaactccttacctcaggtgattggcctcccttggcctcccaaagtgctgggattacagccatgagccaccgcacctagcctagtctgttttctaatagaattgtttatatatcttaaattgtgaactaagaatttagrcacttttttcacttgaaaaaatatttttaaattccccctttttcttttctttctttctttctttcttagttccaggggcagtgtttgatttacaacttgcagaggtagaatccacgcaagtaagaattacttggaagaaaccacgacaaccaaatggaattattaacsaataccragtgaaagtgctagttccagagacaggaataattttggaaaatactttgctcactggaaataatgaggtattgcatttttatttcacttattggtgaaccctttctgcttggttctggctctgatagcttggaagatttgctagcacccacacatgtaatatttgaccacttactagtacaaagtaaagtaaatttggggcatgttgataatctagctagatcatatttcattttaggttatatattattagttaagtgctattattccttttcatcatatgaaaaatgttaattgtgcaattaaacaggactaaaggtattttcataagttaatattatttttctaaaktagttaatgaattgttcggaaactcttgttatgatttaagtgctccttcaaaggctgtgcttgcaatttggaacagttgccagtgaaaggcacagtaactttagtagctgttgttgacaaatgattctgttctatttggtcttgggaagctaaatttctcaaagctgcctctttttttttttcaaagtacatttgattaagagtcacattactaaataaaagaaatttaagtcgtttcatagattttaaataagaggaccaggatctttaggcaatgtgtttgcttctattcacactggaagtcttatttttttccttttgtttctgttaggaagtacaggcaacactgatttttctttccactgtctttgttcacctcacttcatcaactgttcacctgtgagactctttcagcctccaggctagtcatgtccagatactggctgctccccggggcattcaaagaataaacttccttaggaccagtgcagcaatcactgggccttaaagacaaacacgatagttattcagcacctggcgtctgctgtgttgtttcagaattgctgctgcttctacctgtgctgttattttcccccacacatgctttcattctatttctagtcccagccttcctctatttctggcacttacctgtatgtgacagttgacctcaccatgtgctcaatgcattctggccacccaggacttatcactccaagttgctcaccatcttcaacccagggttaaattttaatcctatgttgattcctttcctctgtgcaaaagatgttgaattatgctttctgtgatactctggttgacaactcaggcaaagggcaaaagcttaaccctttgctcctgctgagaaggtcttaaattagatactgagctttcctagtactagatgacaggtttcccacttctgctaatgacatctgttgaatgggtggccacacctgtttttccatgaagctaagaggttctagaaaggctttttttttgtgattctgtctctatctggtctgcaattctcgtctcatagtagagagctcatgagctttggagacgtacaaatttggatttaaattatgattttgtctctcactgtgctatatagcaagtggttaagactgtaaaccaggtttaaactctagttctgccattactaactgtttaaccctggaaaagttggcctgagctctctgaacatcagtttcttcttctctaagatagtgattataagtccctataacaaagggttaataatgagaatttaatgggttcatgtgtgtaaagagcttagaactgtacctggcatatagtaagtgctgtgctaaataattgtgacctattgtgatcattaatcttggcataggatcatccaccttagttgctacccaatattacttcccttatactctctcaatgaaaggagacattatgcttctctttacttctctgattatatctttctttattagatcagactcatttctgatatttctgcttccccatgtagctggtgtttgggtttacctttcaggagattgatgtggggagacagatatgacagaagctttaaatccaaatggccctgggttcttggcctgactctgccgtgttctaggtctatgaccttagaaaaatcaacttttggagacttggtgccttcatttatataatggggcttatatagccaccttacagggttgggagtaaatgacataagaaatacaacttgtggcttagtgtgttcttcatttgtttttcctttctttgaccttggtacctctctcaggatgaggactctcttcccatttctattgatcttctgaaaaagtagcctcattccccaactcaagaactctttaaatgcttgaaatcttattagaagtcaccagtgacctccccagtgtgcaacacaagaattaaatatttttaaccacccttgtgttcttatctccttcaaaatccatccctctgtccccccacttttcagcttttgaaactatttgttccttaatactttctgcaattttatgtactgtgacattgcaattctttggccttgcacaattaaaaatgaaagttcaaaaagctaactctctctattttctaactttttagtgaagatgttccacagagctttggtttcagccatctcataacattttcttttgaagacctaacagtttcaatcactgcttcctatttgtctgactcttttgccttactttctactctgatccttctctctgacgctctggattcctaattgcagccatttgtgggaagagtccaccagggctcattacatctaaataaatttctccccataaaacaaaacagaaatcttctctgagataataggggcttcatgatgggagggaagatgtgacattggaatgaggacagagatcttgggacagtgatagtgacctgtgcaggttcccacagggcacccataaggtctgtccaggcaattaatagtgtcagtgtgtcaagaataaggcctaaagagcggctgacttgaagtcttggtacctgggtttagaattttctaatccctctgactggacataacacaaatctctgacctcaaggtcattgtctaagaaaccatggtccagaaggctttaagagtgagcatttatggcattgatatatgtctgatgtttgtctttttggataatggaacaattatcctctctgtcatgaaggcttgaaaccttggagtcacttctgacttagatcctacttagcattcaatagccacttaatgttaaggtcagttatttctacatccagaatgtgacttgcatatgtctttattttattcctgtatcccccacttcagctcaggattgcatagtcccttgcctggactactgttatctcactatattagttttccattgttccataacaattttccacaaacttagcagcttaaaacaattataatcgcgcagtttctttgggtcagatgtctaggtacagcttagattggttctcctcttagagtctcataaggctgcaagtaagaaactagctgagctgtgttctcatctggaggcttgactagggaagaatctacttgcagcctcattcaggttttggcagattttatttccttttggctttagaactgagggccctggattcttgctggctcttggctggagaatccccttagtgccttacagttgtttttttttttgtcccatgtggcctttttcaacatggccatttacttcatcaagctagtaagaagggtctatataatgtgatcatgggagagacatgttattccttttgccttattctattggttagatacaaatcataggtcccaactaactaaagaagaggagattttacaaagcaggaacaacaggaggtgggtatagtgggtatctacctgagaggccatgcactacactcccccagcctactattttatatttcaaacacttattagaataatccttccagatttaagtatgttatttacattatgaaagtaacctaataagaattgagaacagatgacgaaggtatatatgtgtttaagtaacctaactcttcactakcattgcagaaaatcaatagattctaaaaatgagtgttaacagagcagtatatgcatattatttagtgttttaggggtaaacaccataagaactgaaaacaggagtggtttaaagtgttgcttctgggaagtaagaggtagggagggtataaacagggaattgttattttcattataaacccttcatcatctttttttgtagccatgtagatataacatgatgattaaacttaaaaatataaccctcctatgctaggcatgatttgatctcattacccttattgaatttttttccagtgaatcccatgatctatttgtttctgaataaatatggattatttaaacaagctgaaatatgtataagattttactgttaatatttaaacaaatatttgaaaattacattagcaaaatgagtctcagggtttgagatcttttatttcaacttccacacttatatatgtatctgatctataacattcctaataaatgaggtgaatccagcctctgctaaaatatttgatcaactgttataggatatctaccactgcaaaagtagctcctatcctataagctttgaagtattctttgttatggtcccataagcatctatttcttaagtaatcatgaggttttaggcactctgttaggtacagaaacccatagatgaataagaaactacggtgttctttactttgaactgaaatacctgtcttttaattttcatcagttcgtcctaagtctcctctctagaccaacacagtagattccagtggttatgaacatgaactttggagccaggaaaaatgttccaatcctacctctgctgtcactagttttgtgaacttgaacagatgactgtaaaatggagataaaaatcatctatctctttggggggacaataaagcaagatcacatgagtaaaagtatttaacactctgtaacacacagtagcttaaaatgttagcctttgcagtaacaacaataataaacaatgatttaactctttctcattgaagataatggtcagagttttccgaagacttaatatccttagtttttattagtcatggcttctaggtccttcatatcatggattatattcctgtgcatattttccagtttgtcaaggatcctcttactcacttgaacacaatattctgtatggagtttgaatggagccaaattgagcataattattttctccttcgaagtaaatttcttccttctttcaaaacagtgaaataaaaaaaaatcatttcattgggagcctcattccactgagactgaagtctaaaaaaccctgaagtcatttccgtggactgctctttgcttgaacttcacagtcagatcccatccagtacttgttcaattagaaacctgagacatttttctccaacagacatattgctgcctagtattacagacttctgagattgatatagatgcatcttttcatccaacatattccttgagaatatcaacgtttgtcactggtgaatgtaagtcttaagtgccaagtcttgtgctaagggcttggctggttgctaggaatgaggctgaggacagaacccaagagtagtttaggaatgtcttgagataggtttattttattcagcattaggaacataaacggagtcaagacttaaagatttgttcacctgaataatgtgttgaatgatacggtatcctttagaaaatttcccagcatatgctaattaaaaaaatttttctttttaccacttcttgataacagcacaaatcatgttttagtctacattaaaatatagaagcatttcttaagaataagtcaaacatttcattaattcaattcagcagacctccagtgaccccaaactgatagatgtgatagggttttttagaaaatacaattacattcactataatgaagattactacatgtaaaatcaagttggtttattcaggtggattaggaatttatctctgaagactcctaattctttcacataaattccaagaattcctgggcagcataggcaaggcctttcatgttgacaaattgtgacattccctaactcaatggtgctcaaccagcggcagttttgctctccaagaaacatgtgttaatctttgaagacatgttcattgtcacaactgaggtagctgggggccagggaagctgctaaacatcctacaatgtacaggacagcctccgcaacagaaaaatatctaattcagaatgtcagtagtgctgaggttgggaaccctgtattaaatcagtgagttgcaaatttttaggtgttgcaatggacttttttccctcctatttctctcatttctactgctgcttctctctgccccttcccactactctcttaagtccaaattctttcccaacatttttgcttttaatattattactttttttctcattatgaaaacttaactatcatctaacctaatgtcttttcttaagaggttaagtgtgagaaatatttgcaacatgacacacttagtgataacattctgggttgttacaaagccaatgttcaaatcattgcccaagttatggagggtttttctaatgtcagaatatcagaatttgagagtcattcacatagtcaaaagcattcgggtcaactctcactttgaaatggtagtttgtcagcagagatgcttaacatatgtaattgatgggatgttatgctttaactctccataatttgtctgacatgggatagaaaatattgagagatttaatgcaaaaccatagttgagggggaaattctttgtgctacctcactatagttcattctatagtgctttgtacacagtagattttcaaagggtgactgattgatagtggaaacagctgtgtggtttgggcataaagtattgactgcaacaccagagcttctctgagttatgtgtttgtgattcctgccctccctaatttccctgtggaggcagtgctgaagtgagctgttgtaagacagaagatctttactttgtcccatacaaggacataggaacaaacccatatagagttccctatccatagttctttatcacaacttttaaaaagtagcttttatgggaaacctgttgcttttcatgacagcacttttctgggtagagttgtaacaagatttagacaattgcattttgtaaatatttggaggactgaagattttttgactcatttctccattcttttatctttcagaagaattaatatttaagtaacttgccattgtagatagttaactgaaatgccataaaatttcttgctttactgaactttttcctgagcacctactttcttttttggaaagtattaagtgctttgatattcctaaggcctagaaaacctgtttttggctctctgagtgaagacaactccaaaacatgtaagataattaaaagacagatataccaaaacttataaacaactgaaacctatattatgaattaatataaactctgagggtaaaagagcatggaattgataaggaatagaatttttttaaaaaaaggggttttggaggtaagttttgaagcagaacttgaaaaaaattagtaaaagagagtagatttttcagcatattcttttttcaaaactgtttgattttggaaaattttgaacaggtttaaaagtacagaaaagagtctaataagcctccatatacctgccacctggattcagtaatcatcaataggctgccattcttgcctccggtttttaaataaattccagacttaacatcattttgttcctatatgcctaagcacgaatttctaaaaaccatggacatttccacccataaaataatgccatgaccacaatgaacaaaattactaataccatcctggtatcatttaatacctagaacacattcagatttccttgattatcttcacatcctatgttgattaggtatgttctaattagactccaaacaaagcaacattttctttgattaatgtgtagtcttatttccaaagtcaacattctacacaaatatccaatattatttggccataacaccttttccccattttgtttcaatcaattatgctagtggggatgaagaaatgagaatcatctagttagctcaatgaaaacctctactgtattcatccataatctgttcctgatgttttcacctcagtgtttgccattttggtgaacttgacatgtgtgaattacattataggatctaggaacaattgcagttactttaaatattccttatgtccagagtcttgacaggtatgccatgaatcctgtgtgaaaactattaatattaccatgtagttttattctggtatgtaacttcactctattataaactattatcattaatgtatatcaagcaggcatatagacctctcatgtatggtatacaaatgaggacaggtaattagagaagcaaaacacattctaatacatcagtatgcctagaacacttaccatttgggggtgatcagttacaatatctcagtcatgaaacctttgcatgaggacgtcttatcttaccataaagaaactaactcaagtcagaacaaaatctgtttcttcccaaaatacagtattgttctcttaggaaatacaatgatcacaatgtgttacaatgattcagggtattagtagccggagaatgaaattttggaatctaaagaagacagtggtcatggaaatatgttatcttttataacagcatgattccaaagttataggtkttttagaactaatacttgatttaagtcatgaagtgtaactgtcacagtcttttaaaatatctacttttaattacagtatataaatgaccccatggctccagaaattgtgaacatagtagagccaatggtaggattatatgagggttcagcagagatgtcgtctgaccttcactcacttgctacatttatatataacagccatccagataaaaactttcctgcaaggaatagagctgaagaccagacttcaccagttggtaggtagaattttgattttctataaagttcatttaaaccaccagtgctagctagcacagaaatgaacctaagcttagagttcagccatattattaatggtctttgggctggagtcggatttttttttagctgtcggaaaacctcatgcaacaaatggaaatgccacacaggcagaagctggcccctcctaacccatttgaccttcttcctggagaaagtagcaccctagagtctctggccaagctgcatagacaatcagttattacagttgccaaagcaggtgtgatgggaagggattaacatatcttcaaatcatttacaggcctcacattctctacagcttttgactaataggttttcaagtgtcactaaaggtaaataggtcagaaagttacaaatctagtgcatggtgtgataaacaggtgtaggtgaccccaacgatgtggtgatgtcattagtgtatacacttgctcttcagtgtcagtggctcttacagtttctaaaaggagaatgtcatacgtggcaaattaaaaatactcacctgacacatattatctctctagtttttctaaaatgttaaatgagaaaaacattttattaccttttctctaatttggtacttgtcccattcaaaattaaaagtgttattctatttatggtagaattagtaaaaaaaaatcacattacattcaatagatgtttatatttcacttactgatccatttttcttgtgcaaagaagactggagggcaacactgaaaattaagagtcccatgatttctgatgcagacattcccttaaatatttcaagtttggcctaattgctacttaagagttttagaagcacaaattctaaataaagcgaaaatctaacatttgaaattcttctgggatatttatttgtcagttatccaagcatgcttgctttcaagaattatttggtttactgaatgtatgaacatatggtgaaatttgagtccaaataaaactctttatttatttaactcttttactaaaacctggtattgatttataatatctcaattatatatttctttaactcttctactaaatcctggtattgatttataatatttcatttatatattattgcctactctttcttttcagaaaacattcctaaccagcctctttaagaaagttgttttcttaaaaacactaatgtcatgtttcagagtaatgtgtaaaaactaacaaaattatattatgaacacaaaatgtttgtggttattattgggaggtactcagaaattcatagtaatattcaatacgatctctaaaattaatatttttatgtttactattattacacatctaactttaatagaggtgtgcatggagagattaatgaatacggagaaatcaggtttaagattttatagtctaagaaaaaaataattttgattgtgargccaaacacctttctttttttctctttttactgrattcaaacagtaactacaaggaatcagtatattactgacattgcagctgaacagctgtcttatgttatcaggagacttgtacctttcactgagcacatgattagtgtatctgctttcaccatcatgggagaaggaccaccaacagttctcagtgttaggacacgtcagcaaggtaaggatgtatttcctttgaaacaattaactgcaaatattgctgttgtacactgtgatacttttttttcattcatatgttcattcttctttttaagtgccaagctccattaaaattataaactataaaaatattagttcttcatctattttgttatattgggatcctccagaatatcccaatggaaaaataactcactatacgatttatgcaatggaattggatacaaacagagcattccagataactaccatagataacagctttctcataacaggtagaaaacaatgttttgttgttgttgttgttgttgttcattttacatttctattctggtggaaaatatgcccatctccctgtgccttatatactacagaacacatgctatgtcacttcatattttgttgttttgtgtcaccatgaatctttttaaaatacctgcatacataactcgattaaatgtgtttttcttttactagatttacccacaatgaagtaaaaagcatcagatcacaagcttcatagaaatttacttaactgaaggaatactgtatctggtatatcaaaataactcattattgaagactaaaatgtacgaatgcaaaaatcagctgaagtaattcagctgacatggtatttgtgccaagtcaactatacaccctgcagtgtgccaaaaagttacttttgcaactttaaattattgccttaatattttaggagagaacttgaagtcaccaacatrgaaaggcctataagcccaagaatttgaggagactgcaattatttggaagcgatatagatatctagtcccccgtataaattcttcttactggccttatattaaatggcaccaatcccaagagtattattttaaggacattaaacagtttgtctcttgtccttatagggttaaagaaatacacaaaatacaaaatgagagtggcagcctcaacccacgwtggagaaagttctttgtctgaagaaaatgacatctttgtgagaacttcagaagatggtaagaatatcaattgcagctttaatttttttaaaaaagtggttgtaaatgctcactgccttcacttcatgctacctctagggtctaaagcaacaaacatcaataaaaatataggtactacaaatgttcttttcttcccctagaaccggaatcatcacctcaagatgtcgaagtaattgatgttaccgcagatgaaataaggttgaagtggtcaccacccgaaaagcccaatgggatcattattgcttatgaagtgctatataaaaatatagatactttatatatgaagaacacatcaacaacagacataatattaaggaacttaagacctcacaccctctataacatttctgtaaggtcttacaccagatttggtcatggcaatcaggtatcttctttactctctgtaaggacttcggagactggtgagcttttgttttgctttgtttgtttaataatacacagtgatatagtaagcaaagctgataatcgccatgttgtttacattttacataacctaaaatccctcattattttgttttgtataatccagaaattaattttctttttcaggcaaaagtgcaggaaaaggtttattgtacaaatttttaagtctgatttatataagggaacttctaatcaaaatctgtgaattttcaaatgaaaagaccttgagaaaccaaggattctttcaatgtacctataaattttagattgaatggctacttgctttcgagttaggtaaaactgagacatactcataggaatagattctgagattctaatgaggtatgtgtatagatagtgrtgcagagtgggagcacraaaatggcatgcctggagaagacttatggaggagacagcatttggcctggatcttaatgaggaggttggaatgggcagaaggatgttatagagcaggggtccccaacctttttggcactggggaccagtttcatggaagamaatttttcccctccctccggactagggaggggagtgaggttggtttctggatgattcaagcacgttacgtttgttgtgcactttatttctattattattacattgtaacatataatgaaataattatacaactcaccataatgcagaatcaatgggagccctgagcttgttttcctgcaactagatggtcctatctggggggtaatgggagacaatgacagatcatcaggcattaaattctcataagaagcacacaacatagatcccttgcatgggcaattcacaatagagtttgcgctccwatgaaaatctaatgtcgacactgatctgacaggaggcagagctcaggcagtaattcaggcgatagggagtggctgtaaatacagaagctttatgatgctcacctgctgtgtggcccagttcctaacaggccaycagctggtactagtccgtggcgctgggattggggacccctgttatagaggttgctggatgggttgggagaggatatcccatctaaaggaagtaaaacaagcaaggaattacttgtgttttagtttcggtgaaactagagtaagacagtttgtctgttaatcttattttgttgtttatattgtgttataattatatattggtggcataactattaggccaattctacaatgtattttgagaattaataactaaatataaagttactattttaattgtacgtttaaaacaataaatatttactgactagatactggtggaaccacatgaaataatttttataggtcacaaatggccaaatatcagcaatttcatatagttcagccagatactatatacgaatttctgtcttgaccttgaggatctagaaatctagtaaagtagcttacttttgtagaaaagkatcctgttgagactattcacagaaatgaatacaatgagatgatacaaaagagcccatagataatggcagtagttgaaagtgcaggaataagaaagtaatgaaaggagcattttacattatcaagagccttgaagtgacacttaattgatattaatccatatattggcatgtttcattgcttttgtagatattgtacctgaaataagtatttttgagaaaaatgtctgctctttaatgactcagttttattttgcagtggattaaggaaatgaaacaagcatatttttagcacctattaagggtcacgggccctgttgataggtttcacagaaactgtcttttaaaaattctaaactaaagcaatacattattgttatcttcayagaaaactaagtctaaygaaaaatggagggtttgagaggttcattcattcaaaaaatatttataatataccaggccytactggggataaagtagtgtagaagaaaaggatttccttccctccttaagttttattagttggtgggtgtttcattgcctaatggcaccagctggaaagtgatcagctggaaagtgatgagctggaattagaatccaaacccatctgactgtaaaacccatttccctttcacagcacatgctgtttttgaagtaatcaacaaagctggtaaattataaactatatctaagatctctctgttcattgttacactgatattttgtcattaggcttctgctcagcatggggaggaaagtaataactttgaaagattctattgtgatatgaaataataacyatttttatgaatgcttatcaagtatttcgtttaagtggccatagcatcaagaacaccttattttaatgatgaattataaagcaatgtttttgttttctgattattacatgcacataatcttttacttagtattgaaaatgtaattttattttctgttttattgtctgtatgagtttaattcaaaggcagggacaataaactttaagtgaatataaattttgagatttagtttaaaatgagaattttaattttggaaagtgtcttagaaaacatgcagagccctttattttttaggtgagaagacctaggaccatttgggtaaaaggactcacaagttatagtacatgagaagtaaagttggggcttgactataggcctcctgacccccattacaggcctcgtttaataggctcctgagatggctaaaaaaataaagagaaggggaaaccaacatatcccatggcttcctagccaggcctaacaatcagagtatagggtttaatgcccatcttcctaatatctggttctctgtcctaagttagggttgtctcaagttctgtgcattttccacctggatgaaaatggaagacaatggaatctacattagtgacttttcctagattatgtttgctactgttaaaccacccactttagctcctttggcaaaagaggaagctaaaatgttaggtagggtctcaagtgtcatttgaagcaagatgagctcaagagcaactatttttctgggtttaggctcaaaataatcttattaaatacagtaattataccttctattcatgtaaaaaaatatgggcccactcttcaatattgtttcatgagaaattgagtgatgtgttaactcagtgatgtgttaatattactaattaaaaataggagtaagttatttggttaaatgccttatctttttaagagaaatagagtttactaatgcttggaagtaaaacacccttgtgttcaagcaggaaagatcaatacaagattgattctgtgtgtgtrtgtgtgtatctctgtgtgtgtttgtgtgtgttttaatcatagatgtgcagttttccaataagcctaagattagtttttattttctcatacttagggtgtaataatcataaatacaactttgagaagttcccatacaaattactcttttgatgatctatacatattccctttcctttttaagacacaaccatctttactgtaagcctttaacaaaacaccttgtctgatttggggcaacaaccatgagtggataataacttagatgttgaccaaaattttgtgtagacccccataaatttatttgtattaatgaataacattttaaaatttgtctgcatacattaaagctttatatgccaaacaatagtcttttggcagattcaaggtaacttcccttttttactatcatcatggactatgtattttttctgttttggaattttaataggttcagcttattccaactgattataatcattcctttttatccatcagttatctactttataaaatatttctataattcggggacactctgctatttcagaaaattctaaatgcgtcattactcttcaaaatcagtaagtcattgagtctgtcttgctttatctacctgatgatccagcactagttattccctaagggtaaatgaataaaaatgcaaaggatatcagccttgggtcaggaatacatatttacacactgactactggtggtaggcagacaactgcagagagaaaacttcaatctaatgggaaattttcaaaatcagaagttacaccgagctataaaattcaagcatagcatcacaaattccctttttgtaattaaagagtttttaaacccaatcttttatctatctgttccttacctgtgagtttctctcttgttttaatatattctgtatcatattaaatatattgattcattcactaaacagcttttatgggttccatattatgttctaccaccgtactaggtagtgtagctgtagcagtaaacaagacacaataaatctctaccttcctgaaacttgacactagacaatcagaaaattagacattagaaaataaatcagtaaacaaatttgtgatttttggtagtggtaagttttactaagtgaaaaatatcaaggatagaagagaggaagagtagtgagtgggctatttgagatggaggactgaggaaagacctcactgagaggttatatttgcccagtgatattaatgaggtacaggattgaataagatgaggatgaggatgaaaagtgttccagaggaagaacagcaattgccaacttcttatagaggaaaaaaattgtggagttggggcagagcagggcatttctgtcacttgaacagtgtgagttggggtagagaattcacagatgaggcgagaggcagaggtggatcctgagattcttaggtgccattctaggaactttggagtttaattttaatgaggagcttttggagaattatggaataggaacattatatgatttacagttttcaaagattgctgctgaatatgttgaatgttgaagtaaagagaaaaatgaagataaactattagattgtttgtctgagtatctgggtgagtggtagtgccatttacttagatggggcagtccagggaagaggtcaatatggagaacatccaggagttctgtttgcaacatgtttgaaatatccaagtgccattatgaaggmagttagataaataagtttaaagctcagggaaaagatacagagctgaatatataatttggagcctcaccacatctttggtattcaatcaagggatgaggataaagtcatatcactggacaacagggggagacgttaagaagcttacagctatgtcgtgggcaataccacacatagactttgagaagtagaagagctaatcaaggacaaagcagaagtcactggaaatagaaggaaaaccagaagaagatagtgccttcaaagccaagtgaataaagattttcaagtagaaggagtttattccctatgtcacatgctgctgacaagtaaagtaagatggggcatacaattgattagtgtttggcaagaagggaggtcattggtgacttcacaggagtagattttacagaaaaaataatggagaaaaatgaagtcagattaacagagtatgataggcaaaaaaaaatgtagaaaatgaggaatggcaaattttgaggaattttgataagaagtggagagtagacttcagtaatagctgaaggaacaagtgcaatcaaaagaagactttttaaatcccagactgtatattacagtgtatgtgtgttcacatgtatctctgactaacttcaaatgtaaagtctctgaataggcagaaggagtgaaatccagtgcagacgtggagggatagagcttggaaaggaggaaagagggaaggcagttaagggaaaatttgaagtcagatgataatgtagctctcttctcagtgtttttatttttgctatggaatgagaagcaagtttattagcttcaaataaagagggggagggcatatcagaggtttgtgaagagagaacatggtgaaaacatactttaaagagtgggagactgaattaactaaaacaaaaacattagctatcaggaaatgaaaaggatccatttgagatttgatgttataaatttaagtggaactagtcagcatagaatggtgttttattcagccattttcagctattacactgggcatgtgaagctagcagagttttgtttaattccaattgtaattttcccaggaaagtaaaatagaaacagaaggacctgatggatattgctaggaagtgattacagtgactgtggactctagcctgagcatgtagggaaatgaaggcataagagaggtgatgcacagtgaagatttgatgagggtcagagaattgttggattcaaagtacaagagtcagtaaactggaaagataggagtcagttgtcaaagagaggaatattggcagttattggtaatgacaaagtcttaggtgttgccatgaaagccaatgaggtacggtggggtaaagtaaggtgggggaaaagattattggaattatagagataaagaaatacagagtccagggaactggatagatcatttgcatggaagttggcctctctgagtagtagggaagaagtcagttatcaaagtgatagcatctttaagatgttcagagaagtgacagaggtattaccagttgtctgtcttaaagaggggtagcacgtgatggtatctaatggaatggggcttcaaaggatctgtggttcttcaggaagaaaaaaggagtaataaatgcaactacccaactcctacaccctatcgttagtgagactatggtagaaaaacaaacatgatacccaagagggctaaactgtagtagtatttctcagcaggtccaagatttcacttagagctagaaagttaagaaagcattgagggtagttgttgaggattttcctcaatgtaatgggttggcctggggaaacactagagaagatttagcacatttcagatagaaaggatagtggaattatattgctaaatcgaactatgcattgaattgcaatcctctcaaagttttaaaagtatcaatattcttaaattagtttttcctattaagtgtgccttgacaccataacccaataactggtaacaatcaaggggagggacactgtatctacatttttaaggcttctgaattttatttatctactaaatttattattagtaatttttatatgcattcaatttagaatactaataaaaagtttaatttctttcatttgaaagaaaagagttttataacagractcttgaatggcaataatatttacctatttagtttatattgtttaaccctccaagttaattatttatgttattgttctatgtactcaatttttaaaccattatcttggccactctgatctttcatctgtggtaaatagttttctacctaaagtacattgtctacaatttcatttactgaggatgtgttgaaagcattatccctcaattttttttattgtctgaatatgtttttagtttgctactctttatttttctgggtatggaattccagttgtttttcagttgatgttgattgtcagtctaattgtcattcctatgtagaagawtttttttttctggtactgttaagatggttccttttttgatattctgtattttcacaatgatatgtctaaatatggtttaaaaatttctgcttgagatttactgaaattatttgatctgatgtttgatgtcgttgaataattttgatgagcctcagccattatccctttaaatatttcttcattttctctactattttagaccccctccggatatcatctatgtctcaactgccattttatattttccataactgtcttctttgatctacattcttgataatttcttcaatactatcatccttttcactaaagttctcttcttctttatctaatctgctctttaatacctcaagagatttttaattttagttattttgttctgttccagaaggtctatcttgttctctttcaaacttgcttggttatttaatattatttaccattatttaaataattatttgctcatattttaaaatatgtttgatttcttgaaacacattaaacatttctattttatttcaatatctggaatctcaaaatctgactactgtgtatgtgtgtgtgtgttttctttttcttttctttgctgactttcactattgatatctgatttgcttgtgtgtttagcgattttatcagtgagctcatattctttgaaactttagctgtgagaaatttatgtggtttgtgttgaagttgagttcctccagcaagtatttttatttacttctagttgcttaggagtaatagcagctcaggactacagttttattttaaattctgaagtggaggtttcttcagggtacatatagatatcatggatttagtcaacatatgatcataggaataggcttataattccaaaacagcatattatttatttcttttctatctctccacccagaggagtggcaacagagaaagaaggtttcctttctgtcctctctgcatggtagatttatttctcacttcccatttcctgagaatgaatgcatcacattgcacaagaccaggagttaccattcacatagacttctatggtacatgcagaagaatctgaagtatcccctagaatttttcagtataataaccctggttaaagttgcattctttgggggtttcaggtctttctgcagggatatcactcatctttcagcgggccccagggttttatagtctttctctgacacactacacatatgttactatacaaatgcaaaggcaccaggattaaccaatctatggcaaggcaaaactggctttagtatcagcttccttctcaggatttctgtctttgcattttgtttacttgtttgtttttctgtgactttttttggccagtcaccactgaattctaactttcttttcagcaccacaacttcttaaagaaaatttattttaatgttatacagagttttagttattttaagtaagatattcactcagtttagggtatctgttccaatattttaccggaattrgaatcttgtatatagttttgtactcaaatatacatagaaaaccattttatgcataatgtattcagtataaaaatgttgttagatacagaaaactagtgttttacttaatgatatcccatattcttgggagrtggttttgctgccaggtcataatatgcaacctcacatccaggaggggctccttgccttgtcacagaccttgctgtcgaccaaaactaacctactgatctttttttcatattattattaatgagaagtagaatcaagttttaaatgttttaaaattctctttcttgcatctgtgtgttcttcagtgcaagatatgttcctatagttccaagtattttagtaaacgtatcatcttataactgttattctgtggaatcatagtagcattttcttttgaatgaaaatttttcttatacagttgtaagaactataatttatttatactttacttcattcaggatatttattacgattacattctagtgaaggttcaattgtaaataacctagtgcacttcagtgacaatttcagcagaatagatttttagaatggaattgttttatgtatctatatttttgtttctttcagtgcctgatagtgcaccagaaaatatcacttacaaaaatatttcttctggagagattgagctatcattccttcccccaagtagtcccaatggaatcatamaaaaatatacaatttatctcaagagaagtaatggaaatgaggaaagaactataaatacaacctctttaacccaaaacattaaaggtaaaagaacaaatctaatattggatatttgcatttataatgacagagtagccacaaatattagtttaatgtyaatagtttcagattattttcatgcagggtattacaattttgtctttttggttaaataagctaggagtttattgcaggtcacatgaaagaatactatagatccatccttttccacattatcctatatcattttgtcttcataaataagagctactattgccaaagaatgacattttcacttagtttttatttttggaagattgtgttgacagccatttcatagtttgcctcttgyatattattaaatgatattttgtaagtttcaacttacctatttkatttctctttagkactgaagaaatatacccaatatatcattgaggygtctgctagtacactsaaaggtgaaggagttcggagtgctcccataagtatactgacggaggaagatggtaaatataatagtggatattgatatactttgattctataacattycaagaaacacacgtatagaatgaaacaatgtaaaaactcctctagtcatgggtatcagttgtgtaccataccagcgttatacagagatttcattgtcatggtataaaagaagctagcaacatcagatttacattcagtgaaatcaggcataaaatgttttttattttctgaagtcatcagtactctgtaaaaaacagtcagtcatgtttttccatggggattttcaaggcttaaaatttggtttgaacgttaactgatatatgtcatgactgagtttttcaacttttacatttttaagaatagacattaacatgagctttgaagcagattatgtttatgtaaatgttcagcacttttttacgatattaatgattaacttgataatgagatcaggctattgtacaggctyctgcataattggacaagatgctattccccaaagttagtagctttcatactgaatatttaaacatacctttccctaacccaaataaaatcaactttactachgaggccactttacattgataccttaccaagttagacatatattatgctaagaatataacttctgaaagatatatttgggttaggatttgcattttatgttttatacattgcatatttaaagaaaattattatttttttctgtaaaaggaattcctatttccaagaagggtaggcctggaagtatcatacgtgtttgtggagtatcttttctttttcatctttctttctttcaagtttccccatcttcaagctaggccatagcctgtgactgttaagggcagaatgtgcttagacactgctaggaagggagacttttccctgcattgctctctttcttttcaaaataataaagtcttcaaatccctcttctctttttgcaggtctctccatgttttaacctctaccaaagcatcttggctagggctgtctgtgttgccccagtttctaagtgggctgcctctgtgggtcagttttccctaatcattgcatctacttactaatgcttgcttttccatcaaaacttacctgcccaaattccaatttttcttcataaatagattctccttgctctgaaagttaaaattatcttaataaaaaaaccttccaaatgagtcaatggttaaaaactagggaagaaagttagtgctcttttctatcttatgtaatacctaagattatatgtagtaaaaattttaccaatgcctttttgaaaatagtacccacttctttataactaatctaatcaaaagttcctaatggtaagaatttgagatcttatatgatggaatgagaccagtagtgaacatatattttgagcaggcagacgttttaccactcaagtcaatagttccaaagtatgttgtgcatctgaattacctgggctgttaaaaatatgcttcctcaaggtaaagttccatctaaattcttggccaagtcatatgatttctaaggaacagggtaaagaacaagactcccttgttgaaaaattacagaaaatcgagaatggataaagatctgagaacatttgcctctttgggaattaggaactccttgccctcatgaagctcacggttagaacaagagacctaaatttgacaaatgtgtggacaaataatttttatgatttttaattactggtataaatgttcmcccaaattattcaccaggacaaaagaaggacctaagttactctggggtgtgaggtaaagcgtagckgtggaagttatgtcgaagctgtgacatgaaaatgaataaagagggagggtgagaaataggaaagatcatgccaggtagaggagtgagagatttgtgaagtcctcatgccaggtagaggagtgacagattgtgaagtttcttctcagctaccttgagatgctctgagatgacaaattgaatgcactgcaaaagttctaatttttctagtttcaattttgttagattgtattttagaatacatgtgccaaaatattttagaatacatatgccaaaatgattaaaacttagtctgctacagtggatgtacagtgatttttttagatagacatgttaattacgtttacttagcaataaaatgttttacattaagaataaaatattcggagatctactgaaggttagcttttaaagacaccacgctttatctggtattccacataagcatcttaaagcatattatagagtagaaatggttagttgcaacatattagtttctaagttactgctatttttaattgaagtcctttttgtaaacaataaacagattttacaaggatgctaggaaaaatatttataggtatttgctttgacaaatgaaagagaattttcagagataattcttatcttgggaaacagacatctctaactgatgtatacattcctgtgataatcaatatttgatagcaacattattatagtgccagtgaaaataacagaatgaaaataccaaatacagctatcactattattccttataacttgtctcataaactttctgctgctcaataaaatttttttggaaaattattgttagttaaataatgaaaacatgcacacatgggaacacatacaactacagctgagattattcagagaagtaaaaaagaaaaaatattgaagtaagtcaggtagcattctgtccaaattattggaaatagtgatctgtatatgaactgtatttcaattgacattgtttaaagatgtaaacaaattctcagaatttctgttagctacctaygaattcacattccgtgcataactgtaacaatgaaccaaattttagtgttttccttttttacatgtaaaaagttgtattccattattctaagacattactgtgttattacacagcagctgagaaatgtcattctaaatgttttacctaaatggaaatataaagttggctgactattttgcagtaatgtttttattgcttattcaatgccaaatagcaaatgtatttatattttacactattacagcagagttacaagtagattctaaactattttcttatttacgtgctacattggcatttcctttgtaaaccattcaattttgaagactgagtgaacagagtttgatattattttactttttaatgacacaacagagattgaggaatgtagttttcatcatttgtgaggtcagtcattttaactgctttctcaatgttatgcttatcactttcccaacttcttggatgtgtgatttttttcccacctcttttttattgtctagggatctcttttactgtatatttattcaccctcaataaaatttttatttttattagaggatgacagttgaccaagatgtacttgaacagtaggtgagtcactgtgacataccccttgttcttctttctcatgaaatatttttttccattgaatcacagaaacagatgttctaataccaccatgcaaaatcttcctttatcatctcattttgaaagtaaacagtctcttgtgcttctggagaaaagcactgaacctaattcctttaccagaaagtttataataaaaattgtgtgcatttccatgttaactttttcttatatatgtttaataaaacacattattctataccctaactttacagctcctgattctccccctcaagacttctctgtaaaacagttgtctggtgtcacggtgaagttgtcatggcaaccacccctggagccaaatggaattatcctttattacacagtttatgtctggtaataattttttttttggaaatagttctgagaacagatattaatctgtaacataataggaatgtagcttttagatttcagaatgtggtgctacattaggaayctgattattaataggctagttaatatgttttgattaagaaacaagtttttccatattatgtagtggttcaatcatggtcaaatgaaataattttgcaattaaaacaaaaaattatgtgttacgcataattatactaaattcctactcttaaaagtcattgacaagtcaatttgtatgaatgtaagcatatacttttacacttctgaagttttacacaagtactctcatgtcattgtctttcaagtgtcccttgagcagagtaattttaataaacatttaaaatagctatttttaaagaaatctgttatttaaggtcaatttttaatttgaaatgtaaacaatgtatttcgtttctgatcactgttaccctgattgcctgtttatccttcaattgtgaaaaagatgaaatccaacattgtatctcatgttagttagcatgcttatactacttcatgagaacttggtagattgaaatctttactttgatgtaatgtaaatcctctttagattcaccaattaggtaacacattacctagtggatttcatatatttcaactcagaaaatacaatttacacaatacttcgtaaaacatagccatttccttttatatttctgaatttgaagggccagcattgagggagatgccatgatgttttaaagaagtctcctcttcttctctttcctaagttaagatttttctttccctaattcccctttaacccctttacatatttctctttaagactatattttttgttttctttgttgcctgattcctagtgactttgcctagtcgtgacgaaagtgggagtgtcttgactcccagttagcgaaaaggaagcagggaagaaggttaccattccttttcattaccctatttatttattcactcattcattcattgaacaatattgatagaatacctatatactcatgaagaagactcacataagaccgttgccctcaagagtgttgtatctcttacactcccaagagataactggattatatacccataaacaagcaaacaagggaatgttgggggaaggaggtctacttttgatgggatgcttcaggaagttctctttgaagaagtgtcattgagctgtgatccagttgacaagaaagagcttcttgccatgtaaaaatctacagggcagaactttcaagaaggagggaataccaactgcacaagctctgtggggaaacaaaacttgtcactttgaagaccagaaaggaggtcaatgttgctggggattagagaaccagaggagggtaacagtggggacaggaaataaagttcaggagtcaagccatggtaaggattttgttttcattttaactataaagggagttcatagataatttaaatcactttagattccttataaagaatgaattgtcagggacaaaagtgttagcagggatgctaggctattttagtagtctgggaaagagatggtagtggcaacagaggggagaagtaggtggctttgagctacatttgggaagaaaaactaacaggacttggtgatggattggctgtgcagataagaaaaagagaagaatcaaagatgacttctagatttttgaatcaagtgtggttactactagaatttgatggcattgattaagttagaaaaaaatttaaatgaaacagattaagtgagaatcaagatttttctggctgggattttcagccctgcattatgagaataattgttttcttctatacagtgatcatgcttcccttcctagagcttccgtgtatatctagcataatgcataacacacctagacagaaacacatgtggttggatagcattttaagggatgctgttcacccagtttttctctctctgggtatgaactccatgtcaatgggagcctcctattctaggaacttagctataactttagttgtctatttatagttccaaaatgtctaaaggtaccaggatttgttaggaataagtaatgacaatgtacattacaccacctcttaagaatatagcatggctcaaattttatatgctacaattctgatgtcatatagaacatgaccttttattttctgtaactggttatttttgctttttgcaatgatgctggggttgatgaaagcactgattttagataaactattcatttctcattccctctgggtttaattcggtctcttttgggtaaatattcaatcaattcaaagtttaactcttcaattgtactttttctctcatccttcaagaggtatgcttatctcattttctgaggtagtctgggtacaggggaagcccaatgaaagtggggtgagggaatctcaaatccgtgatattgaaacagaaaaagttcccttgtcytgctctcggggcgtgcgacsggggtgtgtctcaattctctggtgcccccctgctcaaacctctagggggagcatgcagacgggcaggctgtggggctccgaccccatggcagggtctaggggtgaatgtttacagctgaaaccccagtgggcgtgtgttacagtatgctcttttagtttagccatccgtagggggcttgtgttagctcagttagaccccctgccttatcgcaaggacagagggctttctgtatcccggggtttcttgccttggagtaccagaactggatcacacgtgggcttggagagcacgatttattgagtggagataactctcagcagaggggggagccagagggaaatggagtgggaagatggttttcccctggagtcgggccactcagcagcgactctcctccatcctcacccgccaaactgtgcgttgttccgctggttgatggcctgctggcctgcggcgtctgtcagtgtgtgctgttaggccgctgcattcctctcgatgtccagccgttgtgtcttacgccaacgtgttcctgtcaacgtccagccgcttgtgtgtgtgcccgttagggtcttgggatttttataggcacaggatgggggcgtggtgggccagggtggtgttgggaaatgcaacatttaggcgggaaaacagaaatgcctgtcctcatctaggtccctgggcacaaacaagcccgggtgtggggcgctaggcagagacccgcccttctctaccccgcacttccctgcccccactcccatatcaatatcgtgagaaacgtcacctgacctttttatggaatcattctggcacaaacttgcagtcacggcttccagtttcaaggttcctattttcggttttatccttggtccaacctcaaggcttattctagtcccctggttccctagcatgtctgtgttgaacctcaggtagctagatactcccggctgatttctctgcaccaatctacagtgtgaaggatttgagaaaggtacttccacaccctgctgtagctctggatgatctgctagaggagcccttacatcttgcttgacacagagattttctaagcggcttgtcatgtttatctccatcctgagaaaaaacaaagtcttctttacactgggatttctctcccaaatctattcaggtgttgtcaccacttaatccttaccctaagatcttgggacactccagtgtgatggctttgcccttttatttctctcactcttttttcgtagtgcaaaatttttccttttatctttcttttgactgatggaaatttccttcttccgtatactctttcctttctacacctcaagggtcttaatttaattataactacytaattgtaaaactctgtggtcscaaataatccaggattgactcttgatgtgtaaatggaacgtagaaaacacttttccctcagyaaaacttggctttattttacacacacacacacacacacacacacacacmtctctctctctctctctgctttaaaatttactttgttcattgcggtatttaaaagagactattacctggcacataattgaaacttaatatttgttcaatggatgaatgaatgaagagtatgttttaagttagaaactgtatatatatatatataaatatatattatacaaatatatatattatataatatatataatatatttgtatatatattatacaaattttttaaatatatttgtatattttgtatacaaaatatatatttgtataatatatatttttatatatgatatatatgcaatataagtatatgtatatattatatatgattatattacattaggtattatataattattacatattattatatataattgttatatatattttttcttattgtatttctgcaataagaatagtgatgctttttcagataatggatgactcagtggaaaagagtaagattacataaagatagaacaaaaaaggatagaccttaacatattcaagaatattatctataatatatatgtaatatatataattaaatatacacatatatttaaattttcagcattgtcttactaagatgcttgctggaagctttatgctttagtatcttaytaacatactttagtgtcttactaacatccttagttggaaatagccctgtaaggtatagtaagtgtagcgaaggaaatggtcataattctggattccttcattagtgatcactaatcttttttggggactcttaccataatcagttttggggagaggaggcaggtatcataatgtaatacacatgggtttttagtcagtgagacatgggtttgaatcttggctctgacactcagttatctttggttcctgtaaagtacttaataaatggtagctatcattgttagcaggattactgtttcaggagtccatagttctctcataattctcagttgccattatttcagctgctccaataattaccaaattcttgtaaaaaacatttatttgaatatttcctttttttttttttgagagggggtctcgctctgttgcccaggctggagagcaatggcgccatcttggctcactgcaacctctgcctcctgggttcaagtgattctcctgcctcagcctcccgagtagctgggattacaggtgcccattaccacacctagctaatttatttttatttctttttatttttcactagagatggggttttgccatgttggccaggctggtcttgaactcctgacctcaggtgatcctcctgtctcagcctcccaaagtgctgggattacaggcgtgagccactacacctgactgaatatttcttttttttttttttttgagtgtgtcttcaaaatgcaggctgcctatgacatttattatattgggtaacttttttctttatcatgaatatttcttgacaaaataactcatgagggttaatgtgtaaccattttatatccattactgtatgagtcacatttgatttgtagatggtatgttcagaaatctgttttaatccattgcattttaaaatgatttttccttctgaagtttgctttgcaaaataacttttatcatccatcaagatggtaaactagcatttcccccctgcagttattgataaataacacgtatttttcaaatgatacacagtccttgaattcctagggcaaccaccattaaataaatggatttctattggagcactgtaagcttattgttttaattcattttgaattgaggcatgatgttccagtagaacttatttatttactattttcttgaattcaacttgtaattgtttagcacttttacttttagatgtgtcagtaaaatttaacagtagttttcttctttctttaggaaacttctaagagaatataccctctatagctaaaagactgaggactgaaagtgatgctgaaagttctaacttatatacaaatcttgactctgaaatgtttctcaattttcttagtagtaattataagaggtaattctgaaacagtctgacaaatgtttattaaactctgtggggagatatataacatacagcaccttaaaacgattgatgacttattgcagataagatatgcccatgtgaaataattgaaaaacacttgccaaagaatatattaggaagtcaaaataattctaatgcagctctttattaaatatcactggtcaaataattccctcagtaacataaaagattacctttgtaaatggacttctgaatcctaaaaaagtatacctactctagtttctccaagttttctaaaagattttcaccgtgttaaaaatgacctcatggttactgcatataatatagatcaatcatcagaatgggaagggggccatttcagattttctgaagttatatccattttggagtgaaagtggtaaagatagatttgtgaattaggagagcatctcagtggaggcagtgtatgaaggcagcaggaatgactgtcaagagtttgacaagtagcattatagacatggagtactgaggctaagttgggaagatgaaagaaagaaatacagatagatggagcggtagagcatatgaatgctctttagggcttaatatgaggtttctagtgggatgaccaatgttctgaccaatgttctctctcaactctttcctgatagtcatttttctgaatcactctgaagcttgagtgccaaggtcaagcccatggccactcatgatttgcaagtgggtcataaatttagaattgattgtcagtgttaaaaaaatgagtagatctcttgtaaaacttcaatttcctttgtttcttataaaaatcagaacacttttgccatatttcctgtggcaaaaaaaaatcagcagagttgaatggtggctgtcttttatttgaagcatttgcttagttgtttaccgtgattcccatcacaccctcttatttcattttatctgaaagaaaattttgtaggtacatagtaggtttatatatttatggggtacatgagatactttgatacaagcgtgtaacaagtaataacatcatggaaaatggggtatccatcccctcaagcatttgtccttagtgttataaacaatccaattatactcttttagttattttataatgtacaattaattattatttattgtagtcaccctgttgcactgtcaaatactagatcatattcattctttctatttttttatacccattaaccatccccactttccccacccctcctcactacccttcccaccttctggtaaccatgcttctactctctatctctataaattcaattgttttgatatttagcatccacaaataaatgagaacatgtgaagtttgtcatttgtgcctgacttatttgacttaacacaatgaccatgatggcatctcattcttttttattgctgcatagtactccattgcgtatagatgtaccacattttctttatcgagtcaaccattgatggacattttggttgcttccaaatcttggctattgtgaagagtactgcaacaaacatgtaagtgcagatatctcttccatatactgatttcctttcttttggctatatacccagcagtaggattgctagattttacattagctctatttttagttttttgaggaccttccaaactgttctccgtagtgattttactaatttgtattcccaccaacagtgtacaagggttcccttttcttcacattctctccaacatttgttattgcctgtcttttggagaagagctattttaactggggtgagatggtatctcactgtagttttgatttgcatttctctgatgatcaatgatgttgagcaccttttcataagcccccttgacatctgtatgttatcttttgagaaatgtctattcaaatattttgtccatttttgattggattgttagttctttttcctgtagagttgtttgagctgcttatgcattctggttattaatcccttgtcagattgacagtttgcaaatattttctcctattctgtgggttgtcttttctctttgttgattgttttctttgctgtacagaagctctttaactagttgtgatcctgtttgtccgtttttgctttggttgcctatgcttgtggggtattactcaagaaattttcacccagatcaatatcctggagattttacccaatgcaatagtttcatagtttgaggtcttagatttaagtctttaatccattttgatttaatttttgtatatggtgaaagatggaggtcaagtttcattcttctgcatatggatatccagttttcccagcaccatttattgaagagactgtcctttatccaatgtatgttcttggcatctttagcaagaatgagttcattgtaggtatgtgaacttgtttctgcgttctctattctgttccattggtctatgtgtctgtttttatgccagtaccatactattttggttactataactctgtagtataatttgaagtcagataatgcgattcctccagttttttctttttgcttaggatagctttgttattctgggtctttcatggttccatataaattttaggatattttttctatttctgtgaagaatgtctttgatattttgacagagattgcattgcatctgtagattgctttgggtagtatagataggatattttaataatattgattcttccaccccatgacatcgaatagctttccattttttggtgtcctcttcactttttttcatcaatgttttatagtttttattatagagaacttttacttcctgccaccaaaccttattttaaacgaaactttttagtcatttattttacttgtctgaatcttgagttattaactgttgatttaggcaatcttctcatcaagtttttgaaatgcagaacactgagagagtttgtgatttctttgcatgtcagacttagggaacaaaatgtctcagaaagctgaaggaactgaatcaagaatagtgctattaacttaaaaatctcacaatctaaaaatttggaaaggagactttatttcttttaaaggatgacagccttcaaagtggccatctctcacactgggaagtgtgcctccagcaaagaccggagatgggcactttgaaggaggagggatcggggtaggagctttatgcggaaagggttagctaaacatacatatttaacctgctacaggaggagctatgaatattcaggaaggtggtcctgacacatgtgtattgaacaaacatgtatgtaacaaacgatccatgttcactttggggttgagacttcacatttaaatgtattacaattaggtcctatacatcaaatgattttttcagtacacaaagtcattcaagtgcacagcctctgtaaattagccagaaccagtccatggtcagtggtcttatcaggagaaagttactgaaatcagtatcttgtccaatcaaagctgtaattatggcttgtggaacaggggctcagttagtctctgtctgatggtgagctacaattgttttaatattgcttatcttgagtccagtgcttgtttaactgctagagaaaaataaaacctatggcagttagagcataggttaagtgtgtgttttgggtggggattgggggggatacatgtcttaacccttgcctgacatggccatatgtcatgtttataatttggtatcttattgtcacgaacagtctgttctctcagcctcgtggtctctatttcatatggtttggttgtgtccccacccaactctcatctcatgttgaattgtatctcccataatttccacatgttgttggagggactggtaggagataattgaatcctgtggcggtttcccccatactgttctcatagtagtgaataagtctcatcagacctgatggtttttttattttttgtattttatgtctttaatcacatattacttttaatacaattttttaaaattatactttaagttttagggtacatgtgcacaacgtgcaggtttgttacatatctatacatgtgccatgttggtgtgctgtacccattaactcaccatttaacattaggtgtatctcctaatgctatccctcccccctccccccaccccacaacaggccccggtgtgtgatgttccccttcctgtgtccatgtgttctcattgttcaattcccatctatgagtgagaacatgcggtgtttggttttttgtccttgtgatagtttgctgagaatgatggtttccagcttcatccatgtccctacaaaggacatgaattcatcattttttatggctgcatagtattccgtggtgtatatgtgccacattttcttaatccagtctatcattgttggacatttgggttggttgcaagtctttgttattgtgaatagtgccacaataaacatacgtgtgcatgtgtctttatagcagcatgttttataatcctttgggtatatatccagtaatgggatggctgggtcaaatggtatttctagttctagatccctgaggaatcgccacactgacttccacaatggttgaactagtttacagtcccaccaacagtgtaaaagtgttcctatttctccacatcctctccagcacctgttgtttcctgactttttaatgatcaccattctaactggtgtgagatggtatctcattgtggttttgatttgcatttctctgatggccggtgatgatgagcattttttcatgtgtcttttggctgcataaatgtcttcttttcagaagtgtctgttcatatcctttgcccacgttttgatggggttgtttgtttttttcttgtaaattttgtttgagttctttgtagattctggatattagccctttgtcagatgagtagattgcaaaaattttctcccattctgaaggttgcctgttcactctgatggtagtttcttttgctgtgcagaagctctttagtttaattagatcccatttgtcaattttggctttggttgccattgctttttgtgttttagacatgaagtccttgcccatgcctatgtcctgaatggtattgcttaggttttctcctagagtttttatggttttaggtctgacatttaagtctttaatccatcttgaattaatttttgtgtaaggtgtaaggaagggatccagtttcagctttctacatatggctagccagttttcccagcaccatttattaaatagggaatcctttccccattgcttttttttgtcagatttgtcaaagatcagatagttgtagatatgaggcgttatttctgagggctctgttctgttccattgatctatatctctgttttggtaccagtaccatgctgttttggttacagtagccttgtagtatagtttaaagtcaggtagcgtgatgcctccagcttcattcttttggcttaggattgacttggcaatgtgggctcttttttggttccatatgaactttaaagtagttttttccaattctgtgaagaaagtcattgctagcttgatggggatggcatagaatccataaattaccttgggcagtgtggccattttcacgatattgattcttcctaccatgagcatgggatgttcttccatttgtttgtatcctcttttaattcattgagcagtggtttgtagttctccttgaagaggtccttcacatcccttgtaagttggattcctaggtattttattctctttgaagcaattgtgaatgggagttcactcatgatttggctatctgtttgtctgttattggtatataagaatgcttgtgatttttgtacattgattttgtatcctgagactttgctgaagttgcctatcagcttaaggagactttgggctgagacgatggagttttctagatatacaatcatgtcatctgcaaacagggacaatttgacttcctcttttcctaattgaataccatttatttccttctcctgcctaatcgacctggccagaacttccaacactatgttgaataggagtggtgagagagggcatccctgtcttgtgccagttttcaaagggaatgcttccagtttttgcccattcagtatgatattggctgtgggtttgtcatagatagctcttattattttgagatacgtcccatcaatacctaatttattgagagtttttaacgtgaagggctgttgaattttgtcaaaggccttttctgcatctattgagataatcatgtggtttttgtctttggttctgtttatatgctggattatgtttattgatttgcatatgtggagccagccttgcatcccagggatgaagcccacttgatcatggtggataagctttttgatgtgctgctggatttggtttgccagtattttattgaggatttttgcattgatattcatcagggatattcatgtaaaattctctttttttgttgtgtctctgccaggctttggtatcaggatgatgctggcatcataaaatgagttagggaggattctctctttttctatcaattggaatagtttcagaaggaatggtaccagctcctccttgtacctctggtagaattcggctgtgaatttttctggtcgtggactttttttggttggtaagctattaattattgcctcaatttcagagcctgttattggtctattcagagattcaacttcttcctggtttagtcttgggagggtgtatgtgtcgaggaatttatccatttcttctagattttctggtttatttgcatagaggtgtttatagtgttctctcatggtagtttgtatttctgtgggatcggtggtgatatcccctttagcattttttattgcgtctatttgattcttctctcttttcttctttattagtcttgctagtggtctatcaattttgttgatcttttcaaaaaaccagctcctggattcattgatttttttgaagggttttttgtgtttctatttccttcagttctgctctgatcttagttatttcttgctttctgctagcttttgaatgtgtttgctcttgcttctctagttcttttgattgtgatgttagggtgtcaattttagatctttcctgctttctcttgtgggcatttagtgctataaatttccctctacacactgctttgaatgtgtcccagatattctggtatgttgtgtctttgttctcattggtttcaaagaacatctttatttctgccttcatttcattatgtacccagtagtcattcaggagcagggtgttcagtttccatgtagttgagcagttttgagagagtttcttaatcctgagttctagtttgattgcactgtggtctgagagatagtttgttataatttctgttcttttacatttgctgaggagtgctttacttccaactatgtggtcaattttggaataggtgtggtgttgtgctgaaaagaatgcatattctgttgatttggggtggagagttctgtatatgtctattaggtctgcttggtgcagagctgagttccattcctggatatccttgttaactttctgtctcattgatctgtctaatgttgacagggggtgttaaagtctcccattattattgtgtgggagtctaagtctctttctaggtctcgaaggacttggtttatgaatctggttgctcctgtattgagtgcgtatatatttaggatcgatagctcttcttgttgaattgattcctttagcattatgtaatggccttctttgtctcttttgatctttgttggtttaaagtctgttttatcagagactaggtttgcaacccctgccttttcttgttttccatttgcttggtagatcttcctccatccytttattttgagcctatgtgtgtcyctgcatgtgatatgggtttcctgaatacagaacactgatgagacctgatggttttacaaggggtttcccctttcgcttggctttcatcctttcttgcctgtcgccattaagacatgccttttgcctgctgccatgattgtgaggcctcctaagccacatggaactgtgagtccattaaacttctttttctttatgaattaccagtctcaggtatgtctttatcagcagcgtaaaaacagaatattgcacaattttagcattaatttaggtcagctgttgtgtctaacagtaagtggtgggggatatastgaggtgtgtctgacctcccatcctgtcatggccagaaactccattgtttttaagattctgttggttgacaggcttaggattgtatttttagcttaccgtgtactagttaccattttgagacaaatgtttcttacatatttttttcttttttcaaaaataccacaragaaaagaatattatccccattttatagtygtggaaatgttcttgatgagattaaggacacaggtaaggttacagagctaaggatgacagaataagaattcacacccagatctgtgttactctcaaattatgcttttactacaccaatagggatatgtgttataattggcctttgttctaaaaataaaacagcgcatttataggattatagaagtctgaatttggtaacagcatgtgtgaaaaatatttagggagtttaagtaagcttattgcatcaactcatgtgggatatttctaccaaaaaattattggcttaatattggtctgtgttcattggtggactgtatctattatgacagaatgataattacactatttcatgagtcaaaccagttggattactggttagtacagtttgaatacacagagtagagcttgttcagggagaagtgatgaagatggtggaaatcctcagaatcaaggcatatgcggaactattgaaataagggaacaggtcaagattactaatagtcaagattctttttgtttcaagtactggactcatcccaaattggcttaagcaaaaatgggaatatattgatacatatagctgaaatgtcctgataatgttatcaggtgtggttaacagcaagaagcttgatgtggtcaacaatgagatggcctttgtgtcttgtgtataatggcacaggataaaagtgggagtagataaagctggagagctggttaggccatatacattgagtcttgaagccagaataagaagtttgaattttcttgcgagtgcagcggaaagcccgtggaatgttttctccaggagtgtgatcatacatctttgggtacatggtttaaataaaattttaaaattctgtgtaatactaacagtcatattctctctctctgtctctctctctctctctctctctctctgtctctgtcactctcgggtttcttactctgtgtatgtgtatgtggttctacttataagaagtcaatttattactgaattgccttagttctcccttcctaaataatgtggatactataaaaaacaatgggagtatactactgattattattataatacgtacttgacctattgaaaagctcagttccctttctataattctcataacatttgtattttcttgtttaataaggatcttcctgcgagttggtgaggtctagtgtagtgactgtactttatcacaagtcactagctcagtgcctgaaacacagtaagtattctaaacaatttttaagagatagcatcaaaaatctagaggagaaaccacatggacatatttcagcatgtttgtggtcaatcaattttaatttaacctctctaatgctctggatttccacagttctatgccccatcctatctgtgctttctctggtatatggatcttcacataaaaatcaaaatctatggagacagggtatgaattggaacccagaattggccatctcagagaagcaggtgtttacagaaaggaagattgcagagaggctagatttgggagctaaagctttggttggaggaaactaagttggagaactagttctgtacattggaattccagaaactttcagaagagtcagttggacatatcagtccaaagactattagtgtggtttttgtatggtgaatagaattatgtgggtatagaattgraaagtgataagaatttccccaaaaaatatatatagtaaggtgaaggtgatttcacagacaattaagatcaaatgtataatgtatatggctttctgtagcttctgcttgatcaaaggccaaaatagtaaatttaaagttttgcccatcctccaagtcttccataagcaacactttccacagctttttagaggaactgaagaacagacagtttgaaattatgttctttggggagagccaggagtaacaatattataaatttgtagtaaggcaagtaccatgtgtttaaaaattttttaaagcaggggctaacgttgatactatttggttacatttaagagtcctaaccaggactttctctaagaaatgaaaattmatgagcttttgtttttttaaagccttatgatgagaaattaatgtggtgatcagatatttgaaactattgaagaaaaaatgaaagaaaatatctttagtaaagtggaagggcactgatttactgaaaaaaattatttaagtaattttttccaacctttagagctttatgcttataaataaaaagcctctactaaaagacattccaccactgattatattttaaagcttgctatacattaagcactttgcatcaccttagctttttttaaaaatcatttttgtttctacaacacatggcaaactttcagtaaaaaggccatctttcttatttcttgactaaatgtgttaaaagacactttcatttataaaattaattttatgattatatttatagaacctgtaacttttgaaaatttccagtagaaaaatgttttgaaaaatatttatactatgtaaaccctgtcaagtaattgttaaccttgtattcatctgaacacaatttaatttacaccaaagttatttaattcattattatactatactattattgttcacaaaaattgacccttttccaaataaaaattgtgttctaacatttaattcatgatgctttaaagtattaaatattatgctttgctctccctttgtacaaaattgataagttctcaagcagacagggaagaaacatgaataattattcccatattatcattaataatcatatataatccataaattccatacttatagaagctaaattaaaaatttacaaaagagaaaaacaaaactaataagtaatttaaaatacagagttaaaaaagaaatggggagatgatccagaaaaaggagaaaaagcacatttaatttaatgttaggaatgaaaaaggagacataactacagataactcaaaaattaagagatatctttaatctcagcactttgggaggccaaggtgggcagatggcttgatcccaggagtctgagaccagcgtgggcaccataactacagatatctaaaaattaagaaatatctgtaatcccagcactttgggaggccaaggtgggcagatggcttgaacccaggagtttgcgatcagcctgggcaccatggtgagaccccatctctagaaaaaataaacaggtatggtaacatatgcttgtatcccagctattcaggagactgagatgggaggagcacctgagcctggggttggggccatcgacgctgcagtgagttgtgatcataccactgcactccagcctgggtcacagagtgagactctgtctcataaataaataaataaataaatggacatttaaaataaccttatgacaataaatttcaaatggatgaaatcttaaacttctagtaagatataacttatacactttgtaaaagaaaataaaaatatctgaatagtttataagctttaaaggagagaaacgggtagttaataattgtatattcctccaatagcccattttctgaagtattttactcaaattttggagccctaatgggatgataatatgtggctataaacccattgaagccagaggttatgtctttgtcaccttcatatttccatcacagagtataataacttatattttaggccctcaataaatacttgttgaaataatgaaagaaagaagtattgtacatttaaaagtcttgtttttttctaatctcactaatctttgagcacccctgggaagtcatttttcatgtttttgatcagtttcctctcctgttgtcctcagaaattttcccaaatcatctctattttcaagccctttgctaaatctcactcatctcattcaaagcagacaaacccagcttccattctaaacttaaagttgaggtgactatctcaaaaatttgactatttcaaattcctgcttccagaatccatcaactcatttacatccattctcagaggatgaaatctctctctttcagttcaagtgcaatccttcctcctgccttstggatcctaattccttgtgtctgctctaaagctatctatggattattagtgtatgcttcctcagcttcaaactcattctcttcagtggctttgtcctttaatcttttaaatgtatctttcctaccaaaagcaaacaagcaaaacaaagccaaaccaaaccaaaccaagttagccagtcaaccaaatgatgacaataggaacaataacaacaaatgaataccttgctttgactcagactgtctctgagatgctagaacagctttaggaatgtgcaactgtttatgccttgctagtttgggattatttaatacataatcactagcctactgatgctagcaagttgtatagagtaattatgctaaagtacaacatcgaagagtagtttccttatataatgggaaaattaatgaacatcactggttcatatgaggaaaaaaataatctaataaagagtcaagtaagtgagtgttcacattcttcattttggggagttctatttagtgagtgaaaggattaatctacaacatttagataataactgattaaagttttgaaaataaattcacaaaaatgaacagggatagatgtatcatcagggtagattatgcacatggaacaaaatatcaaatgataaagattaaaactaagactatgacttttcaaagggtctcaaaccttgtctagagaaccatacacatttatacttatggaaacagagaaatttatttactgtggtttgggtattcaggattccttcataggcctarcatggacttggtgttgtaagagagaaacaaagaaattggtaaagcaaattaattgctcttttgatctagaatttcttttatgcactagatgtcaaaatgtggtatgtcttttgaaaaaaaaatgtaaattaattaggaaataacttcatcttagagactatttatcccaattgaagactttttttggcgttacccatgagtaaagacagaacaactacatcttgtatttttacagaataatttcaaagtaattaaatttttttttcatttcctaaattagaaaaagcttcgaaacctattcaaaaataggtttagagttaaataagtaaaatcattttactgaggacttccctcaagtttcatctcagtttgaaaacagtcactgggttgggagatttggccagtgttgaaaagtaatatattttagataataattattgtgtaacatttatattccctcactttgtacacagtttatgactttggatatgtaagagttagacctgctttgtcctgtaggcctcctctcttcttctcccacctccctcaactccctatcctactctcaaactttacaaactggctttctagtgaataatttcctggatctctggggccatgccttattctctttttttatactgtggtcacaactaatttctttgctcatttctttctttgttctttacttttagctactaagggaaaaagttattgtccttgtccttaaggaagtcacattgtcattagcaaattgttttagaattatttactgctttatctctctattttgaggataggggctgtatcttactcatatttatgcctaaagtagtgcccgacacaaagtagatgctaattacattttgttggattttgttgaatattgattttgtacatatcatctctaaattcagaaggtgtgaaagttaactttgcttgcactgtctaacgaatggtgtctaaagagctcagactaataatgtttttcatttaaaagactaaaatgaaatataaaaaaccataaataagtttatttttgtgattatttgttttaatggatcacaaatgacgaacaaacatgtaagaagacattctgtctcactcacagccaggaatggctaactaaaatctaactaaaaatctactaaaatctaactatatttataatatccagagatttatgtgagtttgtcaaaatgggtactctcacacattggtggtatgattctaaataattataattattataacttaaaatttgatacagtaatcattttggagtagtaatcttaaaattttaaaaagcattcaaaccatttgactcaagaaacacacaatttgtatcctggtgtagggttgcatgcctgtagtaccagctactctgaaggaaggctaaggtggtaggttaccttgagcccaggattcaagtccagccyaggcaacataacaagaccttgtcgctaaaaaatatatatatttaaatttaaagaagtttaaaaggaatcacaatttaatatgtagaaataaaagtactattatgaaaagatacttctttaaggataactatggcatcattgttaataatagctaaagaaataaaaaagagaaaaagcctaaaagttaactcatagaatgactaaataactatgatatatccaaattatgcaactacaaaaacattatgatatagatcattggtgttaacatgataagagaaaaaaatcaggatatagaacatatgcttttttataaatgaaaataaaacataatggaacacataataattataatatttttaagctaataagaataaaacagattttaaaactaagccagctgaaagcaagagtaacaacttattatagcagtgtcaaaaatgaatttcctacatacgaatttcctacacagggtttgctcaaagggagtgaacactttgagcttcaggattgctcaraagattgctcctttgattagagagctcacacttcagcacagagatttatgtgttatctgcaattcggtaacagctactaggaaaatggagttcgagccttggtgacagttcaattctgtctcctttctctttcttttagttatcagttttatagcaaataacctcttacatatttgatatattctgaattgttttaattaatattcatgctaccctatttttctaacttatttattaaaatatcagccacaatcctaaactgcaaaagaaaaataaaccctaaacagatgaggcatctgaaaaaaatttttttagcttaattttgtctcttgggagtaaaccaagctagatgttgaaactatatatatgcaaactgaagtgaactactatgtttttattaacataatttataacaacwagcttctttttactaaaatatctatttgagataaaaatttatttttgatatccatttccaggtaattgccttgattctgcattatctatggaacataatctgaggctttttttttacagttggtagatacttatgtacaagattttgctgtgaaaatcagggcaagaaggtagtgatgcaaggtagcagataacattgaaatacatttttgaaaataatttttaaaattgatgtaatgcaattagattacttgagctaatagcatagctttattttattttatttattttattttatttatttttttgagacacagtcttgctctgttgcccaggctggagtgcagttgccgatattggctcacttcagcctccgcctcctgagctcaagcaattctcgtgcctcagcctcctgaaagctgggaccacaggtctgcccaccacgcagggctaatttttttatttttagtggagacagggttttgccatgttgcccaggctgaccttaaactcctggtctcaagtgatccaaccgccttggtctcccgaagtgccggcattacaggtgtgagccaccacactcgtcttaattgcatagttttagagatccatgttggattagctcttctgtagtgtcctgatgacctgtgaccaatgataagagtatggaattaggtagtttctatgaaaaggcatcttttctggcgactaatagccacagtatcaagagttttaaaagcccctctcctctggtctcaatggagtcaaagaaaactctcccgactgctcctgaaaaaggatgtcaaatgaaactgtttcaaattgctgaatagcctggctaatcctgcctgtctccaatcacatactccgaatccatatttttctcactgtggtaagctttccaactatttttcagaaaacaaaacttatatttggaataacttggtgcttctgtggcagtaaaaccatgactgaaatgtatctctgtggaaacccttacttcatttaaaatttattattcctcctaatgattcaaggcttcaaatatttcaatggtaaagaaagagctttttctattcagagggaatattcatttacttcttcagtgctttgtgtgtctaaagtagaaaaatatgagattacatgagacatatactttttcagtgttactgatcatattcccttatctaaattctttaataactaactttattattcctaaaatataaataaaaaataatgcacatttttcagcatcactatacacatgttcattttttggttttagatattaatctatacccagttcaaactgtggaaactgaactaacatgactgaaataaaatagtgttatattttgttctttagactcttttttcccttcctgagattttgatatgtayttggagagttttgagtcaatatttatttgatttgttttcttttctggagtgatattgtaaatactttaaagattttgattgagtgagaggtgtgagctatattttcttctttcctgtatgatatacatacrttgtttccaatctmatttctattaaataactataggagagcccacagccttgttattttacatatcactatttagatatttgttatttatttatttgtgttggcctgaagtaaatgttacttttgtacgatatttraaggatagatttattttataaattaatagtttaaataagattttgccagcatttgaaatgaacaaatgtttggacaatgaaaacatcagtatgaaagggaatactgtaattactttagtacatagtattccttaatatccattaaaattggyccaagcaaactctaattatgaacatcatattaacatttgatctaattactgaatataattaaaagcaaaataagttaatttactaaagaattctgaaatttactattttcagtatttcwggataaccaacatcttttttctattaatctagaataaatttccatatattaatgttgtttacttttaatgttagtgtgctcaaaaagtattgttaacttttaaaattcaattctacagataatattctttttatctcaggaatagatcatcattaaaaactattaatgtcactgaaacatcattggagttatcagatttggattataatgttgaatacagtgcttatgtaacagctagcaccagatttggtgatgggaaaacaagaagcaatatcattagctttcaaacaccagagggaggtgagttaaggatgtatgccaattaaaagaatgttctttttctttaaaaaaaaaatcctgcccagaaaaatattcaaatatcaaaatgtatgatgaagcctaatattcatcatcagtttgatgaaaaattgcattttgatcactttttagctgtgtgatgttgggaaaattaatctctgtgtgcctcaatttcccattggtaatgtggaaacagtatcattctacttcacagggttcttatgaagattacataagtttatatttttaaaagcacttagtacagaagttacttgacaaatagaattttatgtgtttattaaacgaaacaacataaaatgcatgaatcatttgtctatgacttttattattcaatataaaaattctaagttatattagaatttcaaattatgtattttgtattggaaacctgttataatattgttctcatatccagagcagtggacaggttttagaacggagatagtattttatgggtaagaaatctatctgtcttcagcttgaatatgcctataataaagtattagaggggtgacccaatgtgttttatggatttcatttctgacatttctaattcaagctttwttgaaaaacattttttatcactttaatttataaactgtaggtaaaattcaggccatttcagacattacttgtaaacacaaatacagtaatttgttcaattatttgttttatagcaccaagcgatcctcccaaagatgtttattatgcaaacctcagttcttcatcaataattcttttctggacacctccttcaaaacctaatgggattatacaatattactctgtttattacagaaatacttcaggtacttttatgcaggtaagaactgaattttcttctagttctttattaacatccttaagttttattaataatacagacttgtcacagtaaaagaaattgtttaccttacattgataattaggcacagatgtattttataaaactyccattgacatagaaaaatgcggtgtagaaatgtcagatacatttaatctctctttacagacacacacacacacacatacaacttctatataagcttcacatgtattaaaaatagtgaatctgccacctactgaaaattctgtttataaagatggccctcaattacacttcctccaataagtgttctctaaagtgctgatggtatcatttatcctcaaagttatttattagctaaattttttttcatttgtttgtatatgatataaatagttctagtgtttggatgtgtttgtttttctttaattaaaaaaagtttttgatagcaggaagggttattataataatagtatattagtagttaatgtttaatgtcagatgaaatgaagaccactcggaatgtgtttaattaatttgtcatagataagattctaggcttgcacagtttgtagatgggcactctctaggatgtgaatgatgatggctatgaaaatagctaacatgcatttactttgaaaaaatattttcaattttcaacagaattatattatttcttcaaattagatgtttcacagaactctaacatataaaaaggataattggaatgattatgattgaatcaaagatgcagagagctggaatataattagaaaaacacggccgggcgtggtggctcacgcctgtaatcccagcactttgggaggccgaggcgggcggatcacaaggtcaggagatcgagatcatcctggctaacacggtgaaaccccgtctctactaaaaatacaaaaaattagccaggcgtcgtggcaggcgcctgtagtcccagctactggggaggctgaggcaggagaatggcgtcaacccgggaggcggagcttgcagtgagctgagatcccgccactgcactccagcctgggcgagagagcgagactccatctcaaaagaaaaagaaaaacacgaatttagaagaaatgctgcaatgtacagaatacatcccttagtggtagaaattattgaccacatgtttgtgtcttaggtgattcttaattatttctatccttttaagtaaaagaagaagaaagataagtcttacaaattctgagttacctaatcccatttgtgactgacagcccaagtttagtcactagttagctctactgagtaacagcctctgtaattaagactttagtgcagctatagtgcaatgtaggctaatgaagagggcaagagcagaacttgcaagctatctcaggactaacctagcagggagaaagacaaagtccagaaggtggtttagtgtttatattctgttctataagagtagggttgtataagtctgtctatttaaaacttgatgcaaagagaaaactactttataaaagacatgtagatataattatagctgtaatgaaagacatgtagatatagttacagatgtaatcgtaaatcaacatttttgaacaaatgccttaagagcagaaggagaaaggaaggtctagttttctactctctatgtcacgcagtttttgctttttgttttgttctctgtagggaagagaaatggggcctagagaggcaatttattttttaaccaaaatgttgtttacaattgtaacaatatgtcattatacccatagaagatatgcaaattggagattttccttcttttatgcatttaaaaaacattgcacaattgttccagtagttctaaattttagcaatcattttgtctctgtacaatttacttatggcttctatgtgatttatattttggttctctttrtcyatatctaaataatatagcataagtatcaaactatggttccaacgtgatcttctaaacctacttattcacacctgggtgtgtaatatgatctaatttgcaattcatctgccttagaacatgttatcttttattaaataatcttaagaatgcttttaagtgtgacagctgcaagagggcacaggctaatgatgttaaaatatttcagaagtatagtctcatattgcttgaagtttatccgtgctttaacttattcctaaagttaatgttaaaaatagcatcaataccttcactacctaattttctattttgaattagtggaagaaagcctcaaaatgaaaattatgtagcagaataagtgtatacctttttatttgttccttatcatctttccccttcctacagaactttgtagaatatgtcatgcrtggcatatcatgttctgcctcctattaccgataactgktgcttctcttagttcccttatgccatgacaagcatcttgtagaaaaagaattgtgtaatatttattttttcatctccaaaagtcttctgcaactatgtcagacataggtttaatgctcaatacatattttaattgaaagatttaaaaaatattatagtagaccaacatcacttttagtacatagtcataattttggagcccttgagtatgtagcraagccatctttcctttttcttatcttggagaatttaacctctttgctactacttggcaatccatattgttcttccttcagttgttgcacattgtattttgtacagcatattaacttttctactttttaagttttacccacttatgtttccttagtgtgcctggcataatgtcttctattttaaaaagtgttaaatgggccrggtgtggtggctcacgcctgtaatcccagcactttgggaggctgaagcaggtggatcacgaggtcaggagatcgagaccatcctggctaacaaggtgaaaccctgtctctactaaaaatacaaaaaattagccgggcatggtggcaggctcctgtagtcccaggtactcaggaggctgaggcaggagaatggtgtgaacctgggaggtggaggttgcagtgagccgagatcgtgccactgccctctagcctgggcaacagagtgagactctgttttaaagaaaaaaaaagtgttaaatgaatattagttggttggtcaaatttgaaaaagttttactaaataccttctgactatatttatataaacaaaagaataagccttacttagataatttgtgccaaaagacattttgtttttgcaaaaataaacagctgaataaaataatcatctggataattgatttaatgttacaaatttgttacatgcctatgcacattaagtcacacagtcagcaggaatgacttctgggtgattcagataatttgttatgtattagccatcaaggtcataggtaatcagaataaattctataacaaaaattaaaatttacatcaaaaagctatgttaatacttttaagtggtgctttatataagccagttgttccatgtgtaaagtagatgtattggaaggtattaaagttcatggatcatattttgtgtgagattgctatattactttaacttgtctatttctatgtaaatcaccacaaaattgtagtaaatcttttattgcactatatttttccctgaatactggcaaaagaaccataaaattttgctaatttaatttgttgataaatttcagaaccattcttactataaatttggtaaatttgcttatcctatgttattcatttaaatgaaactaattactgtttttttttaattgtgtgctagacatggtattaatggctttttgtgcttcatgtcatctaatcctcacaagttgtctgtgaagtggagatgattatttccattttacagttgaaggaagaaaagctttgagattaaatgatttatccaggataccctgacagaatttgaatgcaggtctataggacttaaatggcttcatgtggattggaatgattcaggttactctgcagatggaaattataaaattattcatactgattagctatgtgtttaagtctccttttattttagaattaattttatttggctatatgttttatttttaaaatttgataggaaagaaaatgattrcatacataccctaatacttttttttaagccttggggaaaaatgcaactrggagtcagtcaagagaatttaaaactttctcttactctacacatcagagagtacatcagtctgctatccctttgctacaactgtgagaagtaaagtctgaaaagaaatgtgaaagtctgaaagcccactaaatgtgaataataatagcgatttgagttcatagaaacaggcaaacacattygaaattccttcatcacaaatggaaagaaacacaattaaaagttttctaatactcccaaacttgtttaaaattagctgatgctttgaaaattacttgaatgtttttataaggaaagtgatgctgatcagcacagttgtagcatttccatttggccacttgacattcttcattgttggcttggagtttttattctttgctatttttttgtattggctttgcaataaaaaccaccatctatttctcttttagtacaaacatatttccagtttaattgttgcaataaaaaatgttctatgtcgattttcctaaaacaacatattaaaataatgataaatartaaaatcgatccattgataacaattagtttgaagtgttcatgcatactaaaaaaatacattctgaacaatgaatgtgtttatttttcagaattttacactccatgaagtaaccaatgactttgacaatatgactgtatccacarttatagataaactgacaatattcagctactatacattttggttaacagcaagtacttcagttggaaatgggaataaaagcagtgacatcattgaagtatacacagatcaagacagtatgtaaacraaaaacactaatctttaatatgattaatttaaaacttattattttaggaamttttactatttgtttgaatttgtaataacatcttttatttagacacgttcattataggagtttgaaaatgcaattaatatacttacaaaactattgcagtaatagcctcttctgttcaagaaaactgctaacatccrttcatgaaaattctgttctttttattgcttcaaaagatgtcgtggccatccagttatgggcacaaaaagtactgcatacatggatgaattttccagtagttaatttatttattcattttccttaaggacttaaaaaatctctagcaacttgttttcttttcagactttgaatctacacaggactctgcagcacatctcttctcactgtgtttgtgactaatatatccagagtattttccttaactccagaagtttctcgtatgcatcttctgaagaatcctatttatcccgagtattcagaaaactataatgattgaagatcttgatgttttttatgtttcaattttcagaatacagtgataagtggatcattgcctatttttcttgtagttgtttctgtcatccatttgcttattttcaaagattaatcccttattgagaagtggcagtgacctaaacttctggagtaaaactccatgtttattatctgaaagccataaattgacagattccttaagcatgagaagtgaatgcttgatttgttgttggaacagtcttttgaattgttgacaagttggtcaacataaaaataaatgataaatgtggggaaatatgtatttggggagtctttagcaaaaatgttatattgtaatatatgatcaataccatttcaggtattctttaaatgcagatctctcccaggatttttgccaacctatgacattttatcacttataatttccacaccatggataataagcacttactatgcactactccaggtggatgtcaaatttacgttaatagagtttaatatcacaatacaacttatatctgagaattggaacttgtgtgtaagtagagtaactttgtaatgtacaaatgtgagttgstagtctggtgactggagagattttgagactagatcttgggaaagcttttagtattgattcttctggctacccacatgaccttggagaagtaacttaatggctgagctttagtttcctcatatgtacaacaagggtaatatttagaagaaataagctaaaaagatggtttaaataacataaattatcaaaatatttaaataaggcagtatacatacacatattatgcacacacacgcacacacacacaatctccacatagtaggaaagaagagtcaagagaatattatagaaacaattcccatacatattaaagatgacagagtttattttgaatgatttttaaaataattatttagaagatattttataataggtgaatgtttgccacatctgcatttaaataatttaagagctgatgatgtaatagttgccatttcaacaattatactcagtttgtgaatttagattctgtttagggtaactgwtgatttttgtattttgcccattacctatcatagtacctgaagggyttgttggaaacctgacttaygaatccatttcgtcaactgcaataaatgtaagctgggtcccaccgsctcaaccaaacggtctagtcttctactrtgtttcactgatcttacagcagactcctcgccatgtgagaccacctcttgttacatatgagagaagcatatattttgataatctggaaaaatacactgattatatattaaaaattactccatcaacagaaaagggattctctgatacctatactgcccagctatacatcaagactgaagaagatggtaggctagacccttttattgtctgttaagcagattgttgttcttttcatttacattgctttctgataggaaatagtcttcaattatattgattctgtttgatctcaagtaattagcctttcaataaacacagtgtttcttaaaataatctgctaagaaaatcaaatcccattatgattgaatcctctttttttaatgctgattcacttttgtttcatttaatattctctttttcttttatagtcccagaaacttcaccaataatcaacacttttaaaaacctttcctctacctcagttctcttatcatgggatcccccagtaaagccaaatggtgcaataataagttatgatttaactttacaaggaccaaatgaaaattattctttcattacttctgatratyacataatattggaagagctttcaccatttacattatatagcttttttgctgcygcaagaactagaaaaggacttggtccttccagtattcttttcttttacacagatgagtcaggtaagccagaatccacatttcttcaaacaatttcactgttgcagcgcctgctctctctttttaaggaacagcatggaatatgaaaggatatctgattgtctatttgtaacagccttaccattatatttactttgttgattttttttttgcaatttgagcttcagaatttcctgttctgtttaaagctactttggaactactctgtccaaatacaaattataattaattatgatatttgtttctgaaatttaaatatgatcattttataaatctttttaaactagtgtcttcaagaaagtaagtcacggtgctatttttatgttaaaagttttatgaatgtaagtttcttcatgtgttttcctacagtgccgttagcacctccacaaaatttgactttaatcaactgtacttcagactttgtatggctgaaatggagcccaagtcctcttccaggtggtattgttaaagtatatagttttaaaattcatgaacatgaaactgacactatatattataaggtaggttgattayaacagtatatgtttatttttaaaaatcagaaattgaattaaaatcttttgacatataggaggaaaatggactactaaattaaacaatgactatttttttaaacttctttatttcctacaatttaaggatgcttatggaaaacacaagcaagcgtttgacaggtatataagctgaatacttcatagagcaatgtacttagatttgtaacttccagatatctacaatttaagaaacagttgcatcattttgttaatgctggaaagtgtatagtacttttttcctgacttacaaatataaaatgtatttctatctattgttaacagcagcaccaagggaatctttttaaccttttagaaaggtattcatctttattctggacttctggtcatctttccagatagcatatgatcctacactaattggtcttttacgatatatccttatttttttttttattttcaagagtaattcatttgcaacactaaccacattttccctcctccatttttggaattcagaattagtgaaaaatatccacagaactgatgcaacaaagagtctcaaatatatgtctgtgatttctagcatttaattgccaaaatgtaattaacaagcatttatttaagaaaagtttcttatttttttccccaaaggcaaatgaagtcctggaatgttcttatttagtttacagcaagaagagtgcaaaaaatctgcagtaaatattttactcaatattatgagyattacaatttatgactatggtaaatcattgttatagcatatgtagtttacaaattgaatagtaaaagtcaaaagcaggcattaactttatgtcatcgggaacaatgactttctttctggaaaccaagatattactttaaaacttgatagtctgagtataatttgaatcctattactccataaatgtgaaatttgtttcccagaggtgtgaaataacattaaatgacatgaagcctcttgccctttaatatctatccctggtttaatcttaacattattccattttttatttgctttgtctgtatgggtcactgggagatagatatcaaaaggaaaaaakaatcattttctcagagtaatcgcattcctaggataattgtgtacgtgtgttagagtgtggttgtctatatatggatcttgtctcctcagaatggtgatctgtaacataggctctcttagcatagcggtgaagcaagggctctgactccaaattacctggctcagattctgcctttgagacttactgtgcttcagtagggacattgcttacctcttaatgcaaaatgggagttacaaagatgtgtacattcgaaattgaggattaaaaaggaaagtctccatagagcattttgaacaattccaagcatgtgataaatatgttagctattgttgctgtaattgtacacagtttttaaaagaacaaaaaaactgtccaacattgtaatagcactaagcatgaaatgacaatatgccattatgtgaacatgagaataacttgtattctaagatttgtaaacaggttttctcaatagaagcacatctttaatatttcagaagtagcaaaaataccatctttataccattaagtattcaatacatcatttgggatgggcagtagttttgtgttttaaaatctactgcgtcatgttactcctttttacatctattttctctttcatcaattttcataatcttatttgctttcaaattcctttaaatgtactctcatgccatctttttccctgtcttggcatctagttactatatctgctttcctttttctatttcgctttctctcctagtgtgttctattttcctttctctttcatctaccctgatatcctgacagtatcaatttatattattttctctgtttttctattctttttcttcttttaaattatgtgtgcatttgtggaggtagaataatgcttgaaccacttcaaatgttactgctatcccagtcaatccactgtggtccacagataataaaatcaataggtgacttaggtcactcacacatactgaaagaaattatttatttagtacaaagttctattaaaatatgtttgtaagtattcatcactcatgtttctctttttgacaacatattcttgtgtaaatctgttcactatcccataaactattctcttattattatgccctcttgggttcagttgtttctctggtttttagcccttcctaaccaaaatcataatttgcttgttttgtgtttaattttttctcattcagaaattgtagatttctctagttaatataaaaattccttgatggcagggaccatgccttacatgtgtctataatctccagattatctaatggcatgttttgtaaatagtaagcaggaaagaatgactgaaataaagagattcagtaagcccctaaattcagtgaatttctagagattattttaaaataggattctaattgtaaattccccaagaattaatattcttgttaaaatttctgttactgtgatgtttgataaatgatcaacatggtttatattttgtcagatataatgtaagattcctacatttatatcacataggagattatcttctctttccatgaggatagctgattaatcttagctgctttcttggttaggacaattatctttgaatgaaaactttgtacttaatgataatttttttctatgagaaagcatattcctccttgggcaactatgatactcttttgttccttttctcatatctctaaaaacagtgtcaaattagaaatagaggaatcggctgggaaaactcccaatttaagcttcatggaagcagatattttaaaattattattttaaaataataataatttattattattatatataataatgttattattatttattactgttttgccagtgtctacatacagtagctgaagaataaataaatttacacaggaatgctgtgggtattaaaaatgaatttagataagttcagaaaactcaagtatctctgaccatgcacaagttggatttaaattgcagactgtaattatgcaaattaaaaaaaatgagtatataattccaagtgaaaatcatgaaaataaaacactctagttttttaaaaaggcaattatacgccaggtgcagtggctcacgcctgtaatcccagcactttgggaggccgaggtgggcagatcacctcaggtcaggagttcaagaccagcctggccaacatggctaaactctgtctctactaaaaactacaaatattagctgggtgtggtggcacatgcctgtaatcccagctacttgggaggctgaggcagggagaatggcttgaacytgggagtccacctcccactgcactccaacctgggcaacaaaatgagactctgtcaagaaaaaaaaaaagtctaaaaaaggcaattatgaggttcttcagggaaaagaaggtgcccaattcatccttgtatcataaactgagcacactctatggcacaaaataaatgctaatatttgttttattataatttaaaatatccatgcttattraactataggttaaatataaaaggaataacttcaatgaaaatattccattgatgaacaattttttgacagtgcattaactaataactttttttctgtttttcagaatatatcaggatttaaaactgaagccaaacttgttggactggaaccagtcagcacctactctatccgtgtatctgcgttcaccaaagttggaaatggcaatcaatttagtaatgtagtaaaattcacaacccaagaatcaggttagatacagtttttgagcctaaaatgtttctttttatatttaacacctttcttttccttttcttagtttatatgataaagtatcattacttaagagtctactcaaagggaaattgcatttcagtgctttaygtttagtcttggtcttgtgtgaaatcatatgctgtatgtgtgtttatacatatattttcacacatggtttttccttttgaacagaggaagttgaaataaaatagtagtttgggaacaaaatagccttctagatatctgtgaaaattacctaattcttagaactctttgagacagctggggaaaaagggggaaatgaactagcagtcacttttaacgggctgatttatatttttaatgaaacaatatctataattttcttttaagaagattagttgtgacatttggagagcatgagtcattgcataagccccctatgttcccatcatcccatctttaccatgtggcggacactgaaatatcattggtctaattcatcaacagcttacctgctgtgtcacacatgtagtatacatgacatatcttgcctttgtgtgcacactgaatagtttttatttrggacctatttaatgatggcttagaaatgtacttttyyttttctcaactgcaccatacctttaaaagcacctcttcttaattttttttttgtttacttctgtcaatgtttattgaatgagcaaaagatcccgttctagtcatttcttcttatmagctctggatgcacttcctggtatgttagtgaatctttaaatcgagattgtagaccactgactactaaattaatcatttctgcataaatttatggctacctgacactgtttttcgtgcatttctgtaacaaatgcaaaataaatagcatttataatggataaaagtacatgctgtgaagtcattttctggatttgaatttgagccccatgacctactagttgtataatcttggcaaaggctcatgactctgtgagcctctgtaaccttaactgaaaagaagcacatattagcagtagccatctcataatgttgttgtcaaaaatatttggaaagatccacataaagcactttatagagtgttgtacacacagtaaatgcccacttcatagagtgttggacacacagtaaatgacccctgaatattactgttgcccccattcccatgttacagatgaagaagccatgattgagctagattagatgaaaaggaccttgaaaaaattagtgaagaacctaactagaacattggccttctgacttctagtgaagagtggacatgactgcaggaaatgcatgttgtgaatgagtgatagaatataaaaatgttcaacccataaataaaaaaatattttaataatatttgtacatgaggacaataagaatcagggctaatcttgtagaaagtgctctgtaaacccataaatattttttatcagtaagataaaattgtaccccaacattctatactctgattatttaaataaataaaattttcacctttaagtgttttaatatcaatggttaatttttttttgaggttcaaaaaatcaggaaaatggatattcacaaaatctggatttagaaactaaagttcagcaaattgtcaactatcttatgttaacttattttataaaaatgttcttatatgattctgaaaacaaggaagtgaatagttaatagcatttaattgccagatcccttgatcagccagaaattatctttaaaaaattttttaatgccacatattccctaaatattctcctttagtactggtgtctttatcttacagaggaagaaaagtttataacagctcagtttagacccaggtagagcggtgtaggcagatcagggatcacctgagtattctttaaagcactatgttttgcataatggcagcaagttattttytttcaattttcattgtktgtaatccacaaattgactgtgtcccaatttttcttctaccattatcttttactgtgaccagaaaagttattctactaatgccaccattaggggacattggctaattggacatttctgtgggaagtaaccagtttctctaatgtgcagtcactttggtgggctaggatattgttctttgaccaggcctaccagatatagaggacctctgagaagctgggttagtttcaagtaaattcagagaagctctagaaaataagactgagactccttaaatcttccttccaatgatgtctacaaaaggtacttaaaaatgaaatcctcaagattcttccaaagaagccatcccrgtaaaaaccagtacctttaaattagttaggggtttccaagtactgtgaagcccagatttgtcacaacagggaggcacctgcatctatgttttgcataaaaatgttccataataaagtattgctaagatttttcctttccaattaagagagcagttatcaaacactgcctgggcctgggcttgaggctacacatttgcttctgagcttttgaggatgtgattggtgcttcgaactggaagatatttagtgactggttcaatactgtaatgattaatacaatagcataaaaagcaagtcaacagccttttgattctgtctatgttaatgactttttaagcacacattgaaaatttgatatattaaatatttttctagttctaaacacagatgtatctagtgatcacgtaattcaatcaattatctacttacatatgtatacactttaactttgggcatatgtttatctcttaagttccagatgtcgtgcagaatatgcagtgcatggcaactagctggcagtcagttttagtgaaatgggatccacccaaaaaggcaaatggaataataacgcagtatatggtaacagttgaaaggaattctacaaaagtttctccccaagatcacatgtacactttcataaagcttcttgccaatacctcatatgtctttaaagtaagagcttcaacctcagctggtgaaggtgatgaaagcacatgccatgtcagcacactacctgaaacaggtaactaacgtgaaacaggtaactaacatgaaacctttaactatttggggattgtgtcaataccacytgcaatctttatagcatacttatctaaacatacaaagcacatattaaaaaatacaacacaggctttttatcccacgtgttgcttgagtrccagctgtgtactacattgacccttctccaaaacattgggagattgaagggaggaaaaaaagagagatgatcctctttactgtatttccacaaatataaaacccccacctaatgaattatgctttattgtgatttaaaagaagaaataaacatgtaaacctttcatgtatatctctttttagtcttacttgtttttatggaattctagatgttttcctgaactatatggttgcagtatcagactcattttcatctattttctcccctttataccagcctttatctttcatgttatttgaataaaatatccgggtcgttaagctttagtccacaagacgaaaktctcaccttccctagcagtgctctgtcctgtatcataatatccttcatcctattttcttccatattctacctgcttatataaattaaaacctgtttctttcctgataacaccacttcactgtagatattggcaataattgttaacttctggcacatccagaccctttatcttggaaacgtctttcaagcygtcttgaggctgtaaacctagaacatcaagacatagtctgccttctctctgatttcagcatctaactccacatcctttccttctcattcttccagtgcaacattttttcagactacggtgtttccctttccaggatggaatagttacatttcaacaacaccatctctttgctccttagatctcataccatgtcattgtgacttaccctccaggaagcttcctcactctgagaaggccccattatttgttttttccaagatgctgactggtaaatatttctaggaaaaaatagaaatgattctactttgtttgtctataaattcatcgtccttaattgtcccagctgctccaaaattttctatgtatcccttgtttattcttcataggaaatatgttcataggaatactctctattccatatgaaaattgttctctttctgaacctagtctgttcccccatcatccatatttattgttattttactaataatatcaaatatattgataggccctccttccatcaaaatttatccatgtctttatttatgccctccagatatcttctcttaggaagtccttgccttcctctttcagggatctagctgttcattttcattttaatcttatgtcttctctaggatattaccccatcaatttattctaatatctcctgcatttatcctctttctctttttcttgcacattcacccaaattgttgaaaaatcccaactgaagacctagttggagtatcaactccaaatatatatgaaatggaatttgtgttacatgaaatcactgtctttttcttagttttctatgcctgttcttgacaatccattggaccccaagcctcatagttttatacaattccttactccatctcttctacatacaatcaggtcttatcaattcaatttccatcagggctctgcaatttgccccttctccaccttggccaccaccattgtatattagagggaccttgttgcttcctgtaataacatcttaactagccttatcacccacactactttagcctacccataagtctcatctttcctcctactcacttaattgaattggttctaacatacaattagaccatttatacattggcaggtgaaatgtaatatctgaacaataaagtttagacgtgtcaagttgggtacctgaagcacagaagtaataatgaaaggcaccatgtgtaggagatgggttaaaatactccaaatattttgctcattctcattgtctagaaaatatcccagaatccatcgctaattagaatttggcttctctctagctttttattcttatatccttttattgtatcttctcatatagctgatgtctccagccaaacttcatttatttagcatgctatttcactatttcagtattttaactcagaaaacatttattaaacatctagtatgaactaataattgactagattctcttctttaaacatatccaaccatttttcatcatcagattgctttgcttcctttaactgtattattattttccctttctatgacacataaaattttattcatttttaaaagcccagcttaaatgtgccttctttattaaagcctttaatggcatttctggacttcatcccagacttgctgactcatagcctcaatgagtgaagcttaagaatccatgcacttaagaatctctctaggtaattccgatattctgtatgtattggagagtactggagtagattaccaggaacttttgaggacaggcaaasagtgtcagaaaggtccatcaaggggtgacaggtgttttcccagtgggtggccagcacatcattgctatgtggagtctgtgggaagaaaaaatgtcaaaatgtcaaaatccaggtaggtggtctgcatcagggtggtctagcaccaggtataatggtcttgatcattgggcaggagctgagtctttgagaactggcaaataaaattacaggacaacatatctgaaataaatgagagattcaggaacaaggcaggagatactaggttggtgcaaaagtaactgcagtttttgccattaaaagtaatattgagtatactggtactcaaagtgacagcttagacacaggaatgaagcagaaattcagttagtagaactgtgattcataatccaaatcgcaatgtgcacctgatgtagagccacctaaatttaaggtccaggtctttgtaaaaaaaaaaattatatatatatatatatatatatatatatatatatatatatatttggaaatttgaattccgtcttaactcaggattaaaaggcaacatatgtagagattgaggggattcaaaatcaaagaattaagcagttattaaacatattgtactatgaactatgtactttcctactactgagtaccattgcttctcaaagcttgaattctgcatcagaatgtgcagcactgtggcatggttctagacttatggagtcagaatttgggaattaggactcagatcttcatttaaacaagacatgtgaataatacaatgctgaatttgggaaccactcatttccaccgcaaactctttgcttgtaggaaccatgtcttatttgtctttatttactcacagttctaacagaaagccttggacattgtaggcattcaaatggttgtagaagaaagaaatgaattgttttcttctaaaattcattatttttcatagaggtttttactccattacaatatattatttccacattcccatcaggcaaaattataaatattttctcccatataaatataaaaattctttaaggagaatcatttatataaagcatgagtattaattgctgcttcaaaaatattttgatttttatttttaaaattgttttgcatctagtaggtaattatatttatgattacaatatttattaggtaattgattttttatggattcacatgaattgtttgttgataagaggttagtaagaactgggaatttattgttcagattggaaacaattttacagcctgttgcatacttctaatttatgtggtctaagattagtcacagtgtatagccagctctgagtcactgactccgtacttatttttgacataaagtgaaatcaaatttggctcactctctcactgcctagtgtctgaccttccagggattattgggtatttttttaatgtaaacttggtcaaatctggatgcagctaaacatgtatcgtgacgattgaatttatgaggagattagtgtttggtgtctaagctggttcccttgtcacagtcagatatgttggaacagggcagtaaagatgaaggcccccaagcttggttctacatttttaacagcaattttatgcccaaatatatcatataaaccaatacaaataatacagcaagtccatgtgcatgcggtatttaatttttagaaccttgaattgattcaaaatgcacttattcattttactatcaaaacttagcataacgtggatggaactggaggacattatgttaagtgaaataagccaggcacagaaagacaaacttcaygtgttctcactcatttgtggcagccaaaaactaaaacaattgaactcatggagatagagtgtagaatgatggtttccagagcctggaaaaggtaggaggggcagggggggtaggaaaagcggggatggttaaggatacaaaaacgcaggtagaatgaataaggtctagtatttgatagcacaacagggtgactagtcaataatttcttttacatttaaaagtagctaaaatagtataattggaatttttgtaacacaggaaatgataaatgcttgaggtgatggatacctcatttaccctgatgtgattattatacwttgcattcctgtatcaaaatatcttgtgtaccctgtaaatacatacacctactatgtacccataaaaacttaagatttaaaatttaaaaccagttaaaacaaagctaataaatgttgggatttaatatttggttttaaaaacttggtcttttgtggaagataattttataatttgggtttatccagagctcttccaagctccataatttagaatcaaaagagaaaaataaggtacttccctcagatgcaaaaatttaatttagggaaagtaaaatgtgtatttctggtttttaggggtgttcttttctgcagtgatttctttattagctttttgtccagtggaagatatcaggcatatgcagtgatccactggaaatccactgagcttgcaaatatattaatgctacaatatgattgacttggcatgtattcaatttaattatcatcatcatcatcatcaycattttagagacaatatcgcactatgtcaccgaggctggagtgcagtggctttatctcagctcactgtagccttaacctcctgggctcaagtgatccttctacctcagcctcctgagtagctaggactacatgtttgcaccaccatgaccagcttattttttgtttgtttgtttgtttgagacagggtctcattctcttgcccaggctggagtgaagtggcgctatcttgactcactgcagcctccacctctcaggttcaagcaattctcgtgcctcaggactcccaagtagctgagatcataggtgtgcaccaccacacctggctaatttttgtatttttagtagagacagggtttcaccatgtgggccagtctgggtatcgaactcctgacttcatgtgatctacctgcctcggcctcccaaaatgctggtattacaggcgtgagccaccgctcccagcctgcccagctaattttttatttatttttgtagagatagtctcactatgttgcccaggctggtctcaaactcctggttcaagcaatccttctgcttcagcctcccaaagtgttgggattacaggcatgagccacacacccaatctagcttatttgttaaatacattacttatatattttataagaatttataaaattcttatataccatttaatagattgaatgtgggcagtaaaastgctgcccttctatggctacaaattagtgcactaaatcaaaagttcacttttcctttgtatcctacttacatagctttcctcatccatctcctgaattaagatttgaaataaaggatgtaggaaagttgcatgattctgattgctctcaagcaagtgaataaaaacattcaacttaccggtgggtaatcactagaagcacaaaagacattatagttgcctatcataaatcagagggaaataactattagtatatctaattgaaattcaggtgttttatacagtatcttttatatagacttaattattaaatataatatttttcttcagtgtgaacatcaggtgaggaatctctttttacacttcttgtagtgcagtggacagttgaccaatatatacttatttactgcttgctatgttcaggttctaggtgtggggttcaagacccaagtttgagtgccaggtggcattggggatctttgccctgcacatccaaataactccattattataataaaaacatatttaatatgtataaaacaaacacaaacctacataatatgttggtcaattttgtggcttgaagattttttttttgagacagagtcttgctctgttgtccaggttggagtgcagtggcacaatctcagctcactgcaacttccgcctcctgggttcaagtgattctcatgcctcagcctcctgagtagctgggactacaggcctgtgccaccacacccagctaatttttcgtatttttagtagacatggggttttgccatgttggctaagatggtttcgaactcctgacctcaggtgatctgctcacctcagcctcccaaagtgctgggattacaggcatgagccaccatgcctggccttgaagatttaattaaataaatattcaggagaaaaatattttattgaaacttttttgaagagtgaaatgtgaattggatgttgcttattgatagtttcaaaattgctttctatgggaagttaagaaccagtaacctaattggaaaaggatgatatggcacatatttgtcttgaaccttgaatttcgtagacaagtacactaatgtttacttagatcatctgatatagatcaataaaagtcaggttttctaaatgttctttttggtttatcagtatgctatgagaaaatggcaattgtacatatcaaagaacattcctcttttattggaaatatcttggatggttaggttgagatcagaagagattatgggttgactaaagcactcatgrtaagctgccctcygacaccctcactattcatgaaaatagtgagaatagtagttagaggagaataaataggaatttcaagatacagcaagagaaaacacatagtggagaaaggaatgcagtacaaggggtcaggctgagaccaaagcttgactacagaggagggtattttattagaaggagtgtaagcaggaaggttgaataactgaagtggacccctacttactctgctcttagtttgatgtgactgtcccagaagtttgaatctgttataatagaaaatcaggaacttgtgctaaatttagagaaggaaacaacataagtaattctaaaaacagtgattgtttttggccattttcctgaacactgcagaaatctctttagatggaggatttgttcattacatatttactgagcctcctaagtaatacagaataaaatctccagtcatttcaatggcccataaagcccttcttctcaatccagttatctgtcacttcccttatcttgaaatttatgctcaaatgctacctcttcaaaaaggatttctgactaatttgcccttgaacgtccttcctcccagctagaattttccatactcctttcctgctttacttttctcttttggatatattatatgtaccattatctgtgggtctgttctcacatgctgcatggggacagagatttttcttggttcaaacctatttccaatgtccagaaaagtatctggcatacgtgataataagtatattataaatgaatgaatcaatcaatgcacaggccaagaagagtgataggcatagagcaaacaccaagtatgcatatgctgggtgtcttaagtagaaacttgcagtcacaaaacaatttttaaacagttatgtattaaaacatatgagaaaggcatgtcttgatgaatgtattttctaactaaacattttaaagatagttgtagattcaaatgtagttatgagacataatacagagaaatccttcatatcctttatccattttcttccagtggtaacatctctcaagtagtgacatcttgcaaaactgtacacaaatagtatatcagatggaaaacctttccatcagaataatccctcaagttgcctttgcatagacagacccaattcctgcccaccatcctggcatctctcctcattctgaccccttggacaccactaatctgttctccattttctataattttttcattttaacaatgttatataagtggaattataaagtatgtaaccttttttacccagaaaaagacattcaaccaagtttttttgtgtagcaatcttccttcctctctctctctttctcccttcctcccttccttcccttcccttccctccccttccctccctccctcctttcttctttcttttcttttcttttcttttcttttcttttcttttcttttcttttcttttcttttcttttctttttgaaacagtcttgctttgtcatccagtctggagtgcagtggtgcgatctcgactcactgcaacctctgcctcccgggttcaagtcattcttctgcctcagcctcccgagtagctgggactacaggcgcatgccactgcacccaactaatttttgtgtttttagtagagacaaggtttcaccatgttggccaggctggtcttgaactcctgagctcaggcaatgtgcccacctcggcctcccaaagtgctgggattacagacatgagccactgcacctggcctttttttttttttttttttctttttggtatggatgtaccacagttcccttaaccattcactagttgaaggacatgtgagttgtgtccattttgtggctattagaaataaagcttctataaacacacgtgcacaatttttgtaggaacataaattttcctatgtctaggatatgcactgaggagcacattgctgagtcatatggtagttgcatgttaagtttttttaagaaactgacaaactgttttccaaaggaattgtacccctttaaattcacaccaacaatgtatgagccatccaggttcacacataggtgtataatgatgtatcattctggttttgtgtttccctgatggctaacgttcaatagctaattgaatatattttttatgtacttatgtaccatctgtatatcctcttctatgaaatggctgttcattacttttgcccatttcctcattggattgttttgttttattgttgagtttggggacatttttaatacattctagctacttgtttttgttagatatatggtttgcaaatgatttttgccaggctgtagcttgtcttttcttttctttcttttctttttttgagacggagtctcgctctgtcgcccggggtggagtgcagtggcgcaatctcagctcaccggaacctccgcctcccgggttcaagcaattctcctgccccagcctcccgagtagctgggactacagacgcgtgccaccatgcccggctaattttttgtatttttagtagaggcagagcttcgcagtgttacccaggatggtctcaatctcctgatttcgtgatccgcccacctcggcctcccaaagtgctgggattacaggcgtcagccatcgcgcccggcctgtagtgtgccttttcatcctgttagtagggtcttttacaaagcaaaactttttaattttgatgaagtcctatttatcaattttttcttttatggattgtgtctatggatgtctaattgctctagcaccacttgatgaaagagctgtctctcctccattgaattgctttttcttttgaagcttagtatgttgcttgaaactatgcttgttaatactgtatactgaaaacgtacaaagaataatgttccaatttaagttagatttaagttaatgatgttcattaataaggactcttcagatataaatattccagaatttctcttagctttctaatcaaaacaaccatcagtgaatattaccttactttggaaggtatagatatacatttgaattaaatttagtttttccaaataacccctaatttgagaaatatattctatcttgaaactaaaataatttaatacaactttattttcttccctcccctcccctctcctgtccacattttgtaaaatctggtcctgaataagtcacaatataaaaataaatgtacacttaacttccacttcctccaaccacaggctactttctgttcctcaaccttgggaacaaggtgaaaaacagtaagcaatttgggcagggcattgccaaaacaagattcaagcagccacatgtggacacctcttaaaagaatttggggaaacgagaccaaagaagtcaggtttgatttttagtgacaataacaaacatgaagtgactcttcccaagtaagagtgccactgggatgtggcctggccacatgcttacctatgctatacttcccaggaaaccctgatgctctgctccaggagagacctttatcctttggaggttcagtgtcttgggagctctttgattttgtcaaagagatgagcagagattccctgtgggtattttaaggcttggtgtcaaggtatttttctgacactgctgagcaaagtccatgtatcaaatgatctgtttctagtttgtttaaattcttcacatcacttgtagacctaacatggcaaagcttcattatttaatcataataacacctactacccatactaacttatgatttattttctgtgcctggaaatagtctctgtgtttaacaataatacctggatgcaaaacaatccactgttatatggccacaaaatattaatgatcttctgaaggccaagaaaacattttaactatagttcttgcacagaaattcacacccagaatccccaaaattaaaaaaaatttggacaacacaaataatagtttaagatacacatacatacaacacagatactcttacacataacatcttttacggaaatgtgtttagtgaaactgttcatttgttgacagccacagaagtcatattttgctaaatagctgctccagctgtttttttctttggaaaatgtatcactataggataccctgtttattgcataagataaaagaaaaatatgttgtgataaccaaaaagttttaagggctttcaagttatgtaaaaatggacctatggacatggttaattgtcctcaggatgcaaaattggagctgaaatagtatatcaaacaattgcaaaaagtgtactgcagctatctcttgggtcaaatctggtacccagaaatggagaaaagcctcaagaaacattgctggttggccctctgccacttgactgtatgatctgatcacatgtaagtttcacaaamgattcatatttctctgctagtttgacgttgagaatttgctcataaacctccctaattttatcttcttggtcctttgagaaacacatagtatcccaacttgtcagagaggaaatttgagctggtccttctttatccaggagagacctgaaaaattaggtggtgtgagtactgcagagtgaggctgattttccaaagcactaactttgttctgattaagaacaatttacaatggtctccactgctggtaatgattatcttcttttacgttctgaaaaatctgctctggctgggaaggtgctgctcactgccaggtgggatgggcttcaacagagaaggtagggtgtatatctgaagcagaggtggcaggattacgaagactagggcaaggcagaaggcacagtgccatacctttggaaaaccatggcttagcagtgccacctccatctccatggttcactccagggtcacccaccggtcatgccatgctgttgaggggcagagacctggagcagacactgatatgactgcctgcacagccactggcttctcggtggtattcaaacgccaagccattttcccatactctttgagtttgaggaactttttggagattgcttgagattctctgcgtagaaaatcatgccatttgtaaaaagggtcagttttgcttcttcctttctcatctgtatgccttttgttttttctgtcttactgcactgactagaaatttagctctatgttgaataagagcaatgaaagaggacacccttgccttgttcctgatcttgagagaaagcattcaattcttttaccattgtttgtgatgttagctgtaggttcctctttatcgagttgaggaaattaccctttacttgtatttttctgagaatttttatcttaaatgggggttaaattttgtcaaatgcttttttttgcattgattgatagtattcttgcaatttttcatctttgcttgttaataaggtggattatgttgattgatcttctaatattgaaccagccttgggattcttacactgcttggccatgatatgcatattcctaccccacttggcattgatgtatgtgtatatataactgatttctatttgatgatattttgttaaggatttttgcatctatatttatgaaaaatactggtcagtagtttgcttttttgcactgcctttatctagttactgtataagagtaatactagctgtgtgaaatgaatctcttctaatttctaaaacagattgtgtggaaatggtattcatttatctttaaacaattgggagagttctccagtgaaactatctgaacttagagatgtctttttggagaattttaaaattacatttttatgctctcaggatgcaaagtttgagctgaaatatactatcaaacaagttagaaaaagcaacacttctcgataattcatagattgcaaaggaaatcttaagataatttttaaaatacatcaaactgaatatgctaaaatatattgaattgaaatgaaaattcaacatatcaaaatttgtgagactcagtgaaaagaaagaaatttgtagcactaagtgaatatatttaaaaagagaaaatagaccaataatctaaattccctccacaaaagaaagcctagagatagaaaaggcagagaatccaaaccatgcagaaggcagggaataataaaatgcagaaatcaatgaaattgaaaacagaaaaacagtaggaaaaatcaatgaaatgaaaagcttgttctttgaaaaaataaataaaattgacaaatctctagcaagcctgacaaagaaaaaaagagaaaattcaagaatgaaacaartgcagacactgcagacataaaaaaaaaataagagaatactacaaacagctctcacagttaaattttatatatgagatgaaatgtactgattcttcaggaaacacacctactacactatactccctaatatgaaataggtaatttgaatattttgaacagttgaataaaattaatactataagtattaaagacattaagtgtataatggtttctttgtttgggctgctataataccagaaactggatgaccgataaacaacaaaactttatttcttacagtctggaagctggaaagtccaacatcagggcaccagcagattcagtgcttggtgagggcccattttcgtgttcatagatggttccttcttgttgtgtcctcatatggtgaaagggatgaggcagcactctgcagcctaatcccactcgtgattactgccctaatcccactcgtgagggcagagccctcatgagctaatcccactcataagggccctaatcccactcgtgagggcagagccctcatgagctaatcacctcccaaaggccttatatcctaatgtcatcacactgctgtttaggtttcaacatatgaattttggggtgatgcaaatattcagaccaaagcagttttcttttataccactctagtagagaaagggaggagtacgtctgttattgccaggtaggggtagaaatccgggtttccaacttgggctttgttatacccaaggagaggatttctccttgctcctgggttagcttgggatttttggctccctactaagtctccactgggatcaccctggttgggaggagtagtgataccttttcactgatgtccacatgttttccattgacattatggtggaagggtcttattactactggagagggtgaaaatcttggctccctattttgccgtctctgacatcactgtatgatggttcggtgccttattactgctaagagagagaagaagactaggctctgtattcaacatttgtcagtatgggaaagaatgagatcatagtttctttctgtgcttttttttttgagtagactagcagttattgtctgaaaattttctgtcttgctagactgcactgttttttttgtgtgcgtgtgctttttaaatttttagctagagagagcagattttttttcttttatttatttatttttattaatatactttaagttttagggtacacgtgcacattgtgcaggttagttacatatgtatacatgtgccatgctggtgcgctgcacccactatctcgtcatctagcattaagagcagatttttatgggggctttttttggtcagttggttggtatttccagattgctggcttctaggatatatgagacaaaaagaaaacccaaggaattcaccactatgttattacttgagtgctgcactctctagctggtctaccttcctaactccacctttcagcctcctttcatttattgtgaatttaatgatttttaagtacatagtgggaggagtggaaagaatacatctacttcatcttccttgaagcagaagttcatccatgggtatattttgaatatcaagcaggatactttttatccatctattcaagatcaagttattaaacacatattaagtgctgtggtagaaagtattgggatgactgtaatgaaatgaatatatttcttgtgctattaaagtttagaattatataattttagatcttcattgaatctcatagataacttcatttagtcatttcattttgcagacataggaaatgaagcacacaactraagtgtttgttgagttttctacaattaattatttgcaaaactattactagtccagaattctttctactatattgtctcccctaccttagaaattcaatacatcattgtgttcattggaattacaggagttttcttccattatttcacaatgtctaagtacagacattatgaagtagggaaatttactttcattataaaactttcttcattaacatgtatagatacatttataatgtgagtatatacatacttttgtccaaagtggatttaaaattcaaaaaaaactaaatttctatgatcaaatccatgcttagtctataaaactaaaaatattgtgagttaacgtaataagatctgtaaaatactgaggccattatgggaaatgtttaaagttcctacattcatatcacattttttatcttggatcagttccaaaagtgtaatgtttgctattttgaaattatcttaggtatcaaattccaacttataaatttaaaagttctttaaatgtaattccttttataaaaagtgaatttgggttactctgcataattctccttgaccccactgatgctttaatatctctcattaagtggactccaggcagccactctttgctttatccaagctccagctaaggccagctgttctttgagcagtgtttttattaacttatttaggaactggtgcatatcttattaccctattttccattcctgtcctatgcagctgtagttgatacttttcataacagcctttacatatcaacctcctcccctattttttttcttattctcttttacttccctttttaagtaaattaagcatgtgtgtgcatgcaaaagccctcttctttctttctggtaaccatatgacgtgaaagcttcaggaatgtgcctgttgtttgtctgagattataaacgtcatggaaaaacttttactaatgatgtaaacattcagaaatgtagaatacatgaattttaataatagcaaaatttcttcaatgttgcatttaagaaattaatttagacctaatttaaaatcaatgcaatgtaaatacaaagaaaaggatttgaacagatagaagactgtacaaaatactactaacctcagcttactgaatttcaaatattacaagtttcatggcatatgaaaatacaagtttgaggagggagctattttataaatgtaagacacgcataagttgcagccactatgagattaaacacattcaaaattcaaataaggtaaaagtagcattttttagtatattaataagttatcattgcaatttgaattttcactacctactcactacaaccttgaataaatcacccattgcttctatgtctagatacctttttatgcagaattactattttaaaagcaacttatattagaaatataataaatattattccatatgaattgcaataatgaaatctatacttattaaaagatacattaaaaattaatagcccaagccaggcatggtggctcatgcctgtaatcccagcactttgggaggccgaggcaggtggatcacttgaagtcaggagttcgagatcagcctggccagcatggcaaaaccccgtctctactaaaaatacaaaagttagccgggcatggtggcaggtgcctgtagtcccagctacttgggaggctgaggcaggagaattgcttgaacccaggaggcggaggttgcagtgagccaagattgcaccagtgcactccagcctgggggacagagcgagactccatctcaaaaaaaaaaattaatagccaaataggttcattactaattaaaataacgctacttttgtgttttcatttttatttttttgagacaggatctcactctgtcacacaggctggatatgcagtggcaccatcacagctcactgcagctttaaccttttgggctcaagcgatcatcctgcctcagtctcccgagtagctgggactacaggcacatgccaccacacctggctaatttttaaaatttttattgagacaagatctcactatgttgcctaggctggtctcaaaccactgaactcaatcaatcctcctgccttggcctcacaaaatgctgcgattacaggcatgagacactgtgactggcctactttaatattttttaaaaatcaagatcacattttgtaatttttaaacacactacattaatgatatttgttgtgcatgagaggtctagcatttttaaactttggacttgaaatttaaagcaaaatttgtatttaggttgttatcaaagaaatggttaactgtgtaaaacatgttaaaagttgtgtgtgcaccttaaaagctaaataggatgccatactcagaagcactattaggaactttgactgcagattaaacaggtaccaaacaatagttgaaagtagttggtgacatacttgggctaatcattgctaaggcttcctttctaatatggatgtatgagaaatatagtaaagcccatgattgtttttctattaaaaatctacatttacaaaatattatctagaaagtatgagtgtctagtacttttaatttctatatacatgcataacctgtgacttgttttgagtattatttgtacatttttatgggaaagcttttttcatgcttttaatattttctacttatgggaaatgtatatgcagtgacatgtacagaacttgtgtacaattcaatgagttttgacaagggcatacacccatggaaccaccattcatccaccatatagagcatttccatcccccatagaaagttcccttttacacccattcttgaaggcaactgctgccctgatttcaatcaacatagattagtttcacttgttcttaagctgtctgtgttctcttatgctaggtggcctgtttcaacataactgttgctacagtttttttaatttgttctgttagtgttgagtcattttccatcacatgaatatactattattagtgtgtctgttttcttttgatggacatatggattgtttctattaggaatgaaactgctctagatgtttttgtacaaatcttttttctgtaattacagggtcatagagtaggtatatatttaattgttcaagaaactgatggttttctaaagtagttgcactgtatgaaatacatacccaacagcaccgaatgagagttctaattacatttcattctcagcagaatttggtgttataatattagccctgcgaggtgacataaaaagtatatattttattgtaactttaattcacatttttctgatgattcattatgttggatactttcatatgattattggccattcatatacaggcagtctttgctttacatagtagtataggactaaaaaatgattatagaaactgaatttgtgcaaagtaatcctaataatcaatgtagaaaattatgattgttctgtgaccttcaaaaattttgttacaatattcaaaacttcaagtgtcaattataaatgtatgtgaaaacaaaaaattatttagtatactaatttaaaacattagaaacatagagatttttttgtataaaaacttatcaagaattttttttctcattgttcagcttatgttacagagagggcctcttttctatgtttcagttaattgttatacactttcaaagtttagatcagttttcaatattttatcctttgcactttcaatattgtcaaatatcagcaagagttctcttggtgtgaaatttttgttttgctgttttttayttccttcaagacatcatccttcattgaattcatcagaaccacttgctttaatttctgtccatatttgtcttcagtaagttgtcttggctgcatatgtaaagtttcttgaacagcagtgttaacattcccatggtcagctctttgttctgaaactccgtttatgttatattcaaatttcatttccagcactctcacttttgttgctctgctaccatctttgttagccaatatgtgtcacacgagttcattgctgtgagacaaggaggcaacataactacacaattttctccctgtgcataaactgaagaacaaatgcacaatgaccaatcaatgacagattttgaacaaagtgatgtcactgattataatgtgcatctgttatttatgtaatgattttatggatgaaagagctagaagcaaagttttcatattataaaatttttcatacccaatatatgatagtaacaaattcaaactctgttttgagaagacaggtgttacttaactaaaccatagtaacaaaaattcaagcacattggaatgtgcaaaggactgacttatctcctttagggaagtttctgttcaagtcattactgcatttttctcctgaattgtctgtctttttagtactgagttataggagttctttatacattttggatacaattcttttttttttttttttttttactttttaaaaaatttgtgttctcattgttcaattcccacctatgagtgagaatatgcggtgtttggttttttgttcttgcgatagtttactgagaatgatgatttccaatttcatccatgtccctacaaaggacgtgaactcatcattttttatggctgcatagtattccatggtgtatatgtgcccattttcttaatccagtctatcattgttggacatttgggttggggactgttgtggggtggggggaggggggagggatagcattgggagatatacctaatgctagatgacgagttagtgggtgcagcacaccagcatggcacatgtatacatatgtaactaacctgcacattgtgcacatgtaccctaaaacttacagtataataataataaattaaaaacaaaacaaaacaaaaagaacaaaacaaaaaaaatttgattttttttttttaatttaagttctgggatacatgcacagaacatgcaggtttcttacataggtatatgcaagccatggtggtttgctgccgccatcaaaccgtcatctatattaggtactcctcctaatgctatccatcccctagccccccacccccgacaggccccagtgtgtgatattcccctccttgtgtccatgtgttcttattgttcagctcccacttatgagaacacacgatatttggttttctgttcctgtgttagtttgctgagaatgatggtttccagcttcatccatgtccctgcaaaggacatgaactcattcttttttatggctgcgtagtattccatggtgtatatgtgccacattttctttatccagtctatcattgatgtgcatttgggttggttccaagtctttgctattgtgaatagtgctgcactaaacatacatgtgcatgtgtctttatagtagagtgatttataatcctttgggtatatacccagtaatgggattgctgggtcaaatggtatttctagttctagatccttgaggaatcaccacactgtcttccacaatggttgaactaatttacactcctacraacagtataaaagtgttcctgtttctccacatcctctccagcatctgttgtttcctgactttttaataattgccattctaactggcttgagatggtatctcattgtagtttgatttgcatttctgtaatgaccagtgatgatgagctttctttcatatttttgttggctccataaatgtcttcttttgataaatgtctgttcatatcctttgcccacattttgatggggttgtttgttttttttcttgtaaatttgtttaagttccttatagattctgggtgctagctttttgtcaggtggatagattgcaaaaattttctcccattctatagtttgcctgttcactctgatgatactttcttttgctgtgcagaagctctttagtttaattgtatcccatttgtcaattttggcttctgttgccattgcttttggtgttttagtcatgaagtctttgcccatgcctatgtcctgaatggtattgtgtaaggttttcttctagggtttttagggttttaggttttacatttaagtctttaatccatcttgagttaatttttgtataaggtgtaaggaaggggtccagtttcagttttctgcatatggctagccagttttcccaacaccatttattaaatagggaatcatttccccattgcttgtttctgtcatttttgtcaaagatcagatggttttagatgtgtggctttatttctgaggcctctgttctgttccattggtctatatatctgtttggtaccagtaccatgctgttttggttactgtagccttgtaatatagtttgaagccaggtaccatgatgcctccagctttgttctttttgctaaggattgtctttgctatgtgctcttttttggttccatatgaaatttaaagtggtttttttctaattctgtgaagaaagtcaatggtagcttcaagggggatagcactgaatctataaattatggagtctcactctgtcacccaggctggggtgcaatggcatgatcttggctcactgcaacctctgcctcccgggttcaagtgattctcctgcctcagcctcctgagtagctgggattacaggcatgtgccacctggctaatttttatatttttagtagagacagggtttcaccctgttggtcaggctggtctcgaactgctgacctcatgatctaccagccttggactcccaaagtacctggattacaggtgtgagccaccacacccagcctacaattctttattagagatatgtataacaaatattatgttccagtcaatagcttgactttctgttttcttaatggcacctgtgcataatcagacgagtttaattttgatgaaatctaaattagcaacttttaatctcatgtcagtacattttgtgtcctaattaaatattgtgaaaataatatcctgggttttattctagaaatgttatagttttaacttatacatttatatttttgattcatcttgaattttgggtgtgtagtatgagaagtgattcaaagtttttttttgtacatttatcaaaacatttaataactattttaaagatacttttatttataataaataaacataggtcataataaattgatataggtcaatcacttgaccctatgtgcttgaatttatttctggaatatattttattccattgatttatttatctgttattgtaataaaaccacactgtgttgataactgtagctttattataagtcttgaaatcagtttgtgtaagttctacaaatgtgttcttttttcaaaattcttctggctatttttggtctttgcatgtccatataaacttttaaattataatgatcttattaatttttacaaaaatgcccatggcattttcattgggattgcatcagatctatatacatgcatgtatacatctatacatggggagaattgacatctcagcaatgagttactaatgaatatgttattatttctccatttttaaaattatttatttcagtaatgttttgtggttttaagtaaatggattttgcatatcttttgttaaaattatttgcatgtatttaattttttaatgttattctaaatagaattgattttagtcattagtttgatgcaaaatacagaaacacaatcaatttttatattgacattgtatcctatgacattgttaaatttacttcttagttctggaatgttaaaaaaatttaaataatattctatattaaaattattgtgtcttctaaaattaaaagtatttttctctctttctttctttcttaactccatgactttattgtttgtttgttttgccttatagcactggcttgactctccagtacagtgttaaacagaggtgataaaagccaatatccttgtgttgttcccaatttcagggagaaggattagtttttcatcattttatatgatattggctgtagactttctgtagataccccttattaaattgaagaagattctttcatttatagtttgctatgagtatttattgtgaatggatgttaaattttgccacttgattctgaatttaaggcaataatttgctttttctcttttattctcttgctgtgataagttacatggtttatttttgaatgttaaattatatttacattcctgggataaaacacacttgatcagatgtgttattctactatatattgctggatttgatttagtaacattttgcttaagattgttgtatttttgttcaggataggtattggtctataattttcttttattataacattttttctcagatatttacatcaaagttatactaccctaatatcagtagttggggaatgttctttcctcctttattttcacagttattatttcatcctaaactatttgatagaattcactagtgaaaccatctgaacctggagttttctattgtggcagattttgtattactttgacttctttaataaatatagaactactcatactttctttttaaaaaattttactttagggccgggcgcggtggctcacgcctgtaatcccagctctttgggaggccaaggcaggcggatcacgaggtcagtagatcgagaccttcctggctaacacagtgaaaccccgtctctactaaaaatagaaaaaattagccgggcatggtggcgggcgcctgtagtcccagctactcgggaggctgaggcaggagaatggcgtgaacccgggaggtggagcttgcagtgagccgagatcatgccactgcactccagcctgggccacagagtgagactccgtcttaaaaaaaaaaaaaattattttaagttctgggatacatgtacagaatgtgcaggtttgttacacaggtatacatgtgccatggtggtttgctgtacctattaacccatcagaatttctatatcattttatatgttatgtttccaagaaacttgaccattttatttaaaatgttgaaaatattggctcaaggttttttgtaatctgcagtgatattcctgattttattcatgatgtgaattgtgtttactttctttttatacatcttaataagtgtttatgaaatttataaatttttccaaataaccaacttttatattaattaatgttctctattgtttttgtgctttccattacatcgatttctgatcattatgattttcttgcttctaaatattttgccataaggttctatgtattagttccatgtggttaatagtgttttgcaaaatgtctgtatcattatcacttttccgcctaatcgttctaacagttattgagaaggaaatgataaaatatttaactacgattgtgggtttttttctttcagttctgtccaggtttgcttcatgtagtttcagttaaaaaaaaagtttttaccaaaaacatgcgtattgtgattgttatattttcctaattaactgatcctttgatcattataaactatcccttttatctttggggacacttcttgtattaaggcttttttgtctgttattaatataacacatgttcttttattcgtggtttgcatcatatatctttttctattcttacttgtgaattatttgtattgtatttaaactgtggctggtggacaacaaagtacgtctcttgtgaacaacctataatcaggyctttaatcttgtctgacaacctctgacttttaaatggagtatttacttcatttagatttaaacttagtattaatttacttgactttggatgtactattttttctttgttttctatatgtcctatctcatttttagttcctctgttcttgctttctttcttgccttctactgggttaactatatatttttagcattatattttaattcttctatttgacttttagctatgtttctttgtattattatttttcgtggcttctcaagggactgcaatatgartacttgacttatatctacttaatttatgtaactggaaataaaatacatgaattttgcagaagtattcccatgtacttccctgtagtttctgctgttattgttatattttttgtacttacttttatagatgtcaggttgttataygtgtcagctatatatattaatatacgtgtgtatgtgtgcatgcacactcggtttttcagctgtctttctactgagctccttggattctccgtcatgtacatataattaaaatattaggcaaggatttaaggggagtttagtcccaaactttggatctaactcctctgtttccaactactttagcagcctcatactttattctctgacacctcaagccaatagctgcgttttttttccttttccaagttcatacatgttatctgcagaatagtttgatataagttatcaccagatcagagttcctcaagttggaatattttgttttaaattcttagctgcttttgcaaaatttttgcccaaaatatgaatctgagctcctttcaaggtttttattaaaatatctagtcacactgaacactttagtgtataatagccttaatgtcacttggtgatgggtagatagaagaggagtttacattgcaataatatatatggctttaaattgattattagacatttttgttctaaaaatcttttgatccaagtgtggtggctcacacctgtaatcacagagctttggaaggctgaggtgggaggatcttttgagcctaggagtttgagaacagccttggcaatgtagckagatcccgttagtacaaaaaaaaaaattagcctagagtggtggtgtgtgcctgtagttccacctactcaggaggctgaggtggaggattgcttaagcccagatgtttaaggttacactgagctatgaaggtaccactgcactccagcctgggcaacaaaatggcaccctcatccctgtaatcccagcactttgggaggccagggtgggcagatctccaggtcaggatttcgagaccagcctggccaacatggtgaaaccctgtctctactaaaaatacaaaattagtcaggtgtggtggcacatgcctgtaatcccagctgctcaggagggtgaggtgggacaattggttgaaatcaggaggcagaggttgcagtgagccaagatcatgccattgcactccagcctgggcaacaagagcgaaaccccatctcaaaaaaaaaaaaaaaaaagaaaaaagaaaaagaaaaagaaaagaaaatcttttggcaatcagagagttttctgttggttgctttataccactgaggcccatgtccccaacctcacaccatcctttgagcctttgttctcattgtttctccttccatctcttccttctctctcgctttctcatatgggctcctgaacaatcccaattctttctttattctttcttatggatattttcccaaagcttacagtcagaactccttgtgtatattttaatcaataaagtttttctttacagccacaggtttttttttctttttgagacggagtcttgctctgttgcctaggctggggagtgcagtggcacaatctcggctcactgcaacctccacctactgggttcaagagattctcctgcctcagcctcctgagtagctgggactataggcacgtgccatcacacccagctaatttttatatttttagtaaagatggggtttcaccatgttggctaggctagtctcaaattcctgacctcaggtgatcttcctgccctgcctcccaaagtgttgggattataggcgtgagcccccatgcctggcgagccagtttttagaagaaaaaaaaaaagatattttaaataacattcaattatattcaacatttggtggaacttgtatttttgaaatctgtccatccatccattcatctatccgtctgttgatttgttcactgattcacatttttgctaagcaagtacttattaaatatcaatgtgtgccaggcattatatgcttatctgtttcttctgacctttttttttttcctattctacttcactgtacattaactattgatatagactcaattcttcatctctggtgttttgataatatgagtactcctttcaaatgttcatttactctcatgatttcaattacttatagatacaggaattctcccaaattcctttacgtgacccattatgctaacacaaacctctcctgtgataactctgtttatcctgctaacaagatatgaagctaacattttatttcctcatactcattcttgggtaaatctccacaagccagtatgtctttctaatttcttcgtcactctcaatggttcaatttagtctccaggtgttataggagtggtctcaatagataattaagttggctttctaattagtcttctaagaactgtttcagataaactatgtaaaatcaaagttgtcatttttgataaatattctcatgagatgacttactgcatgcagctgtcaaaactaatgaatttataaatcaagccagctcattttgcctttgtattagtctgttctcacactgctatgaagaaatagctaagactgggcaatttataatggaaagaagtttaagtgactcacagttcagcatgactggggaggcctcaggaaacttacagtcatggcaaaaagggaaccaaacacctccttcttcacatggcagcagcaaggaaaagtatgagtgcccattgaaggggcgagccccttataaaactatcagatcttgtgagacctaactcactatcatgagaacaggatgggggaaaccacacccatgattcaattatctcttcctggtccctcccatgacatatggggattatgggaactacaattcaagatgagatttgggtggggacacagccaaaccatattggcctccaaacagaatatgtataactatatgtataactagctttccttgtaacgatccctaaaaaatgactttttctttggaagttttattgagaaattttttaaaggtaagtgtttcacagtatgtaattttaagactaaaattatagccatggtttatatttggggccccaattgtccaactatacatgcatgggaacagatacaaaacaattttaaaatatcttactcctatttcatgcacattgaatacatttataagactaatttggcacattagtatgaatgggtcagtccatattctcagctttgtagtagcactcaaaatcctgtttgtgtttcataacttgataaatactccaaaatttctctggattaagccaggctaccagagagagttgcacatgaacggtatacttacaatctctgaagacatagttttaataaaacatatttgagaattattccacctacgtactcagagtgacgttgtaagaatgggaaatttttttttttggatttttttaatttttattttttattatactttaagttttagggtacatgtgcacaacgtgcaggtttgttacatatgtatacatgtgccatgttggtgtgctgcacccattaacttgtcatttagcattaggtatatctcctaatgctatccctcccccctccccccaccccacaacaggccccggtgtgtgacgttccgcttcctgtgtccatgtgttctcattgttcagttcccacctatgagtgagaacatggggtgtttggtttttaaaataaattttttttcccatcccaaaaaatcagaatgggaaaaaatttttatttttatttatttatttattttttatgagatggagtctcactctgtcgcccgggctggagtgcagtggcgcgatctgggctcactgcaagctccgcctcccgggttcatgccattctcctgcctcagcctcctgagtagctggggctgcaggcgcctgccactacgcccggctaattttttgttgtatttttagtagagacgaggttccaccgtgttagccaggatggtctggatctcgtgacctcgtgatccgcccgccttggcctcccaaagtgctgggattacaggcctgagccaccgcacccggccaagaatgggaaaaattaaacatacttagtatttactgtgtatggatgttgtcgaggacattgcttattaaattatggtaccctctttatgggttttttcagaagaaatgtatctttggtttcagtatcagagattattgtatttttgttcatttaatttatctttatttgcgataacaaagatttactatcttgcttttccctttattttatttatttgttataaagagccaaatttataatttacttctaggaagtctacagtgtgtattttgtcagttaatctaattcctgggttcattccatttgttttacccctattttctctgtgctcaatataccatcacatcctgtcaatatttctttacatttttctttagctctactcctaattatttttaacctaccagatcattgtaatctatgttgtgctttatatgtaaaatatcgaacaagtttttatcaaacttgcctattcctaataacaagtgatatgaaggctcagacttttaagtttatatgtcactaattaatctctgtctgttgtttctctgtcacctactgtagtcacctaaactgctttcaaactttcactgcctttcaataacaccaaacctgataatcccccacacttttttcttatgactgccttacactattttccttcagcctaagatttttcccagcccttgacaaacattttgttgccacttatgtatctctccccgtactcaacccactgaatcctttttctttcacatctttactaatcctcagttgttccttcaaattagagctcccagatcttcttctctgtcctgttgcatttacctctttgtagttatttctattaactaaaatatttttcatctatgtatgaaaaggttcttatacattgacttgtatcctgcccacatcattcaatgtgaatgttcaataaatgctattgattaaattcaagctagtgcaaaatttgtagctggtatgctgaaatatgctttgaacttaactttgaaggtatttccatttttgtattgatccatactatattaatgttagcaaattttactttgtgtatgtttaaattatctatctgtatgttgtgtttctaaaaggatagtagattatttaaaatttctagagacaaaaatattcttaaacttgggaagattgggttgataattttgtatgttttataaatataattcacaaatataacttttcagacatctgttttgcttaaaagagagtacatctgttcctgaaaaataaaaatatatagtcataaataaacaatttaaacttggtcatccaacttagtgtacttatccaggtcaatgagaagtcaatacaaaactaccttcacaatcctatcaggagagtttggcaatttctaataactgatattcagaagtttatagaataattacattttatacatgtattcatcttctaagtagaatttactggtcagtaaaaactctcatgcatttaaacctataacaaattcttgcttatttagatctacagaccctaatttcaaccatgatgaaagtattttagtgataagaataatttatgaataaaaatgtaatttagtgaataccttggcagttaatgttgatcgcttcatcacagttcagtcatgtttagaaaatctaagcaagctgtgtgattactccaggaagcatggaatgatgtgttcaaattagtaccatctgtggatagaaaaagtttgaggtttttagtcattcttaaagaatggaaatctgattctccatgctgaaatgagtgtaatcctttttctatctgtaattcaatagggcagttgccttgaaatagtctagttcagcacacagttcatcaaagagaagatactggatataaatgagggttactgctggtcacttatgaatacttctgaggtagccttgtttaaaaaattgtctacaagttataccatatatttcacctcagatcagattcatttttggtttatctttctaaatacatttgagtgaaaatgtggactagattttgtaccacatgaaaacaaaaggctgtttcaatgaaccatcatttatttccacagtcaacaaacacttatgagtgccagtatrttccagtgtcccatcactgtgcctgtcacataataggaggctgaaattgtcattatgtttcctatagccaggttacaaataactcttgcctggatttagtggtttttctttttaagaccttttcttctctgaaagcttaattggagaatactagagtctgtgaacgaatattgatctgctgaaaatttttactgtgtagcaaaatttgctagtaacaaacaccagctatcctaaaatctgaacattggaggaaaaaatagttgatcatagaggcatgggcatctagtcatccctccagatgggattagcaaagggcagcctcttctgccttctctagttcattagctagtgaatatttccctctcatttccagtggtttagcaaactctagggagagaaaattgaaacatgggaaaggtaactggtagtagatctaaaaaagaataaataaaagaaggaaagcatttgtacactgattcttatgaggaaagagtagagtgtaagattttaatgaaaacaaaagtcaatataaaaattttcaaggccaggtgccatggcgcatgcttgtgatcctagcactttgggaggctgaggtgggcagatcagttgagcccaggagttcaagaccagcctgggtaacatggcgcaactccatctctacaaaaagtacgaaattagttgggtgtgatggcacacgcctgtgattccagctacccgagagactgggttgggagggtcatatgagcctgggaggttgaggctgcaatgagccatgattgtgccactgcattccagcctcagcaacagagtaagactctgtctcaagaaaaaaaaagtaaaaatttccacataataaaaacgatcatcagcaaaataaaaagacaaataacagatttggaaaatatatcttcatcaaggatcacaaaaaggttatattaaaggcttaaataaataaatagcaaagccatacacccaatagaaaaaaaagtagaaaaaatacaaatgatagtttatgaaaaaggaaattaaagagagagaagtgcaataagcttcacactgaaacagaattttttccctctgaaacttttattgcatactctgttggcttggggaacaggcattctcatgcatgttgacaggagtaggtattggtaaaacctttctggagtgtgatttagcaatgtctaccaatgctacaaatatgcatatgttttacctagcaacgattatcctacagatttactcacacatatgtgtggaatatgaaagcataggcttgtacattacagcttgtttactgcaaatattggacacagcttaatatcatttcatagaggctggtaaaatcaaattcgatatatccatttcaatgtgcttactccatacaactccaaacactgaagaaaaaggcaaaatatatccaaagcatatatatagtgaccctaaatcccagtttccagggcagtctgggtttatgcttgctgtgctggcatttcatccaatagacattgccttttactctcaaaagtgacctgtctgtataacaaataatttgctgcaatggagtgaatgtttatttcccccctagaatcatatgttgtagtcctaactccctgtgtgatgctattagaaggtgaggcctttcagaggtaattaggtcattagggtagaaccctcatgaatgggattaatgcccttataaaaagaatgcagagagctcttttgccctctttctgctatacaaggacacaataagaagccagcagtctggaaccaggaggctggttctcaccagaaacctgccatgctggcaccctcatctgactttcagttccagaacgttgagaaataaatttctgttgtttgtaaatcactcagtctatagtaacttgctacagcagccaaactaagacagtcactctagatatattctttggaagtgagagaagggactgggaggaagaagagagtcggatatgaggttagatgaaaagaaagggaaggctgcactccagcctgtgcaacagagtgagaccttgtcaaaacaaaacaaaaacaaaaacaaaaacaaaacaaaaaaaacttttcaagtatatcactgtgcttcagataaagctaaaagtcatatatttggtttaaggactcagtttaatgtgattccacttacattgcctacttcgccccttcccattcatctccttgtagacccagcagccttcattaagtgttttcaatgtgtgacactcttcttcttcagggtcttaacaccttcacacatcctgatattttttatctgtgaagcttcttcttatccttcaggtctctaattaaattatccttcaccaggaaagccaaataaagtcccctgttataccctcgattcatttgctcacacattcaaaaaacatttattgaatcaccattttgtttcattcagtagtctagactctgagagagaaaatctgttatgtacattgacattttatgtgtttataacctacaaataaacatctatttttgagtgatttttttcaatatttttattgagatggatgcggaagcaaaatctttttgaatcttttatatataatgttggggtgatgtggaggtgaaagtagattaggcctctttggagtgggttttcagtgcagagctgagatttataggaaagtaaatatcagttcaaaataatgcaggctatacaaactaatagagctatctgaaaatgaattttaaaataaactacccttgagatgttgagtttcccttgctctatgtatgtaagcagaggctgggtaagtagtgattgctcattttgtagggggaggtttgtattggtcttctattgctgtgtaacaaattatcacaaacttagtggcttaaaacaatacccatttattagctcatagttctataggtcagaagtccaggcgtgttgtgcctaggttttctacttattctcacaagctgaagtcaacttgtcagtcaacattttcttgtgtaactcagggtcctctttcaggttcacgtggttgtggtagaatttagttccttgcagtcacaggattgagagccccttccctggctggcttttagctaagggcttctctcagctcccaaagatgttctgtgttccttatcatgcagctccctccttcttgagagccaacaatagagaaatttttgtacgttgaatccatctctttaaagctttgacttccttttctgaaaacggccaaaaatactatcctccttttagagggctcaggttataaggtcaggtccactggatagctctctattttaaagtaaactgattaagattcttagttacagcagcaacatagctttccatctgtacctagatcagtgtttggttgagtaagtggaagaatctgtttttgtacagggaccgggaatcttgagggatatctgcagacacaaaggtcagacaaagagacaagatgaccaagatgatctctcaatttcaaattctgagattacgtgatttttctcatttatttgcctgttcttatggattcagtcgccaaaatatatcttaaaaactgacttctgtactgttgctatcacctaatttcgtctttcctggacaaatcaagtagtctctgaatttctcccttttcctgttttgcaattaccagactgtagttgataaaatgtacctctggacatactgtgacattttttatagctttcaattgcctgacaagctatctatagtttcctctgacacagtaagtccccaagctattgtgcagtcttgctgtttgttattgccgacatgaattacaagctgcaattaaacttgtcttagctcacatcaccctctcttccatgatctccacttttacaatcagtgaaattccatctcatgtgccatctcttctctaaaaacattttctgaacacccacgtcaatcaaatacatctgatttatattagaatattttgaaaatgtatcttatgttcagatgatctgagttcaaatttagtgactgaggcatttgaaaaaattatgaaaattctaaaacttcttcctctataaatttacattttttttccctaaagatagtgttttctctaattgcttttcttcatgataggtaaagataaaacagaatgtgttgtaaatagtgtgccagttttggtaaatatatatatatatatwgtaaataagcaatagatctgtaaataattcgataaaaatttaagatgaaatccaaaattttaactgaagtccagacctctctctacagaatccagactcaagcttctatctagtatttgatttctccttctgggtgtctgagaggaatttcaaagttaacctactcaaaagaaattgttaatcttcctccccaaagcttacccctcttacggtcacccacatcttgattaatagtgacttcatctttttatttgctcaatccataaaccttagggcattttttattcctctctttctctgatatttcacataccacacatcagcaaaccctgccagctctccttcacattatattcaggagctgaatgtttctcttcacttctgccactaccaccttggaccaggccactgtgatctcttgtgttgacattgcagttgcctgctaattactctccagccttgttaccctttagtctgttctcaacacagtagctagagtgattctgtgaaagagagagcctgccacttctctgctcaaatgaaagccatgacaatgtcctctagtgtcatgtactggtagcttgtaccagtcactcagtccttcttgttattctccaaatataccaggcatgcctccaactatacagtttcctctgcttcaaatttctctttctgaaatattgacatggctaggtcccctacctacatatggaatttagtatcttctttttctttttttttttattattatactttaagttttagggtacatgtgcacawtgtgcaggttagttacatatgtatacatgtgccatgctggtgcgctgcacccactaactcgtcatctagcattaggtatatctcccaatgctatccctcccccctccccccaccccacaacagtccccagagtgtgatgttccccttcctgtgtccatgtgatctcattgttcaattcccacctatgagtgagaatatgtggtgtttggtttttttgttcttgcgatagtttactgagaatgatgatttccaatttcacccatgtccctacaaaggacatgaactcatcattttttatggatgcatagtattccatggtgtatatgtgccacattttcttaatccagtctatcattgttggacatttgggttggttccaagtctttgctatcgtgaataatgccgcaataaacacacaagaaaaaaacaaacaaccccatcaaaaagtgggcgaaggacatgaacagacacttctcaaaagaagacatttatgcagccaaaagacacatgaaaaaatgctcatcatcactggccatcagagaaatgcaaatcaaaaccacaatgagataccatctcacaccagttagaatggcaatcattaaaaagtcaggaaacaacaggtgctggagaggatgtggagaaataggaacacttttacactgttggtgggactgtaaactagttcaaccattgtggaagtcagtgtggcgattcctcagggatctagaactggaaataccatttgacccagccatcccattactgggtatatacccaaaggactataaatcatgctgctataaaggaatttagtatcttctaatcccttctctgattacctaatttaaattttcaatatccctgaaactctccttcttctcattcttctttttctccgcaactctgatcatcatccaaaacactacagttggccctccaaatccatgtgttctgcatccgtggattcaatcaactacagctggaaaatatacaaaaccaaaatgtgtctgtaccccacatgcccagacttttatttcttggcattaatctctaaacagtacaacagctatttatagagcatttacattgtgttaggtattgtaaataacctagagattatttgaattatatgagaagatgtgtgtagtttatatgcagatactacaccattttatataaggaatttgaacgtcttctgattttgttctccgtggaaggtctgggagccagtaccctgtggatacaaaaggtgactatgtacaatacttattgatacttttattgtttacagctcccctgaatgtaaattttcaggggcaggaatttttgtctgttttgttcattgtattttcagcacctataatcctacctgtacatattagatgctcttagatatttattgaatgttgaattaatatatctttagagatcaatgagctttctaaatatttattaattttcttattttaaaatgtgaatattaatatacagttcgcattatgtaattttcacatgtcatcattttgattctctttatctccatcttcttaacaaaggccgttgaagatatacaaagaaaggcatggttaagaagagttccaatatcacttaattgattgctctttcttatttctaaccataacatgtgtatattacttgcccaataaactgtctcttgaaaacaggacatgagctttattgtatcctgaatccctaacaccaggctcagagcctgacacatggtatgcatttggcaaacctgtagttagtgtggaagcaaataaatgactccaagcaggactacatgttaattctaaatatacatgagataaaataaaaaaaaatagatgaattatatacattaaaactgtcagtaatattgtttatttaaaattgttttataatcaacatttactagatataagatgtgtttgtgtttatttagacatttaaatacacaagtatcttcccttggaactgaatattacaaactcaaaccatacctagggaagtacttaggatgatatgagcatacagttttcctttgtaacagtgaaatagttctatttgaagccaaagtttgtttatataagccacttatgattgaatttggaagcaaaatcaagaattaataaattacaattattttgtcctctacccttttaaaatgatggtcccggaagcatcactctaaggttcttctcattaagtgtggggataattaatctaagagctatagtaatttgacagatctctactagctcctccataatagaattctattctttcttctctttatgaagtgtttggtaattgtaactgcttttaatttttccctttaatttttagttcccagtgttcccacaaatattgctttttctgatgttcagtcaactagtgcaacattgacatggataagacctgacactatccttggctactttcaaaattacaaaattaccactcaacttcgtgctcaaaaatgcaaagaatgggaatccgaagaatgtgttgaatatcaaaaaattcaatacctctrtgaagctcacttaactgaagagacagtatatggattaaagaaatttagatggtatagattccaagtggctgccagcaccaatgctggctatggcaatgcttcaaactggatttctacaaaaactctgcctggccgtgagtattgtcctgacatgtacatactgatttctgttatattctgtatctgtctatatattatgctttatacttaatctaattgtgtgtaaaatcactgaacatagaaataactgaggacactaccatatataacgacatatttagttttaatttagttgaaacccaatgagaaattcaatgttagtcattattagggcttttctcaaactcccaaagttgtgccaaggtcctagagtctcatattgcaacagtgcattgtgggaagctactctgatgcgctaccattaaaccatactgattattatctaatgcccttgacccaggcccacatttttccttcatatttagaggttctgttgcttttaagcccaactttacaaccttttcagtgacttcaaacttacacacacacacgtgtgaccacaataaccctgattgatctgtctgcaagtcgtttttcagcttgtgtttttcaactgcacaaaattctgaggcaaagaaatatcaagcattcaactcccagcttgagatgggaagaagaaaatacagagaagaaacacaaatacttgaaattgttttgccatctatacatctttcaggactttaagtgcttttccatacaaaccactaaatgtataggtaaagattgctcttgcaacttaggttttatgtttatagctaactggttgccctgcttgcttggagaatatcattaaccataattaagtaaaaaatgtatattccttatcctgaactctgtttacatagaattgtgatggttactatgcaacataaataagttgcaaatcaagtcctgcaagccagagctctgggaaatggctgcattctctgaaatgccatttctgccccagccctccagagcaaatttcaggtttgccaggccacccatcccatataaatccttcagatataggccttatgttatcatcttcctatcttgactgagactctttaaaggggattcctttcaaatccaaattacatattcttaaacatttttgatacttattagtatagtaacatacctacacacacacacatagattttcagtgacaaataccatgttagtacttatagatagtgaaatacactttgatctagagggctttattttctaggccaccaattgtgtctcctgttacaatttcccagagtatctggcataatgtctgtaatagtaaatgttcaataaatgtttgttaatataatttgacatttgaggtagaatcctgacaactcagactttgacacaattgtccaaccttttctctttctggcactttgacacttggtttctgtaagatctacccttctgttttttctcctaccttcctggtagctccgtctccgtcctctttgctgaattattctcagcaaataattgttttttaactgtaagcattggagagatgagagagctgtacttggcccttttctcttctttatcagcacacaaccccaaggagattttaccttaattgctcttattctggtctatagctttgaagtctgcttacatcttgactattctcaaatactatttccagtcctgaatgctgcctagaactccagatcagaatatctgcctgatcaactaatcactgggcttgtgtgttgaatatacttctctatattaacatgatcaaataccaaaccttctcatatcattatttatctgtttgcagcaaatgaaaatccaggcactgttcctttcctcctcaatcctgcccatgattcatttcaaccacaccatctaaacaaattcctccatttgcattactattacattagtacaactcttcattactgctcccacagcactagcctaactagcctcctacactgccagactggtctttttcaacctaaagcagatgatgtcactttcttgcttaaaactatccaatgggctgggcgcagtggttcatgcctgtaatccctgcactttgagaggctgaggcgggtggatcacgaggtcaggagatcgagactatcctggctaacatggtgaaaccccgtctctactaaaaaatacaaaaaattagccaggcatggtggcaggtgcctgtagtcccagctactcgggaggctgaggcaggagaatggcatgaacccggaaggcggagcttgcagtgagccgaaatcgcaccactgcactccagcctgggcacagagcaagactccgtctcaaaaaaaaaaaaaaaaaaaaaaaaactatccaatgtactcccatggctcttagaataaattttacatttcttaacatggttaacaagccctatatgacctggcttttaccttaaactttaacattatttatagccatgtttcccccataccattgtcttccactcatactagacattttttgttgcttacacaaaataaattcttagaacttgcatctttgtattccctgtttcttttgactagaatgttcttccacctccttcttcacatgagcagcttcttataacgtagatctttacttaaatgatccctgatcagaatgaatttccctgaccactcaatctaaaaatagtcatgcagtaatcttatataatatcatgttattttaatgaacatttataattacacgatcatttttatttgcttgtgtttaggatctgccttgatcattgctttttttttttttttttttttttgcgacaggatctcattctttcacccaggctggggtgctggggcacggtcacagcttactgcagcctcgacctcctgggctcaagtaatcctcccacctcagcctcctaagtagctaagactacaggcacacgccactgtgaccagctaattttaaaaacaattttgatagagatgaggtctcactatattgcccaagctggtcttaaactcttgggctcaagtgatcctcctgccgtggcctcccacagtgctgagatttcrggcatgagctaccatcccacgcatattttcttattgtctagaatagttcccagtaccagtagatactctataaatattccctgaatgasagaaatttgattcattaagttctagtgggtaggacaaaacagattgttttccagtgcaggtgatgataaggatgacgatactataacaaagatagcaaaaatatagaaaaaattcagtttactttggggttagtcagtaggtatggttattttgaacctgctgattttgtcaagaaatagctattctaatataactagaaaacagaaataaataaatgcccagagaacaaaaccaaatacatcagtagcctagatctggcttgtggacagctgatttgtaacctttggttaaattatgcctgtgcctttgtgcctgctgccactaagagttcctattctgagtatctcacttggggagtacctgcttctaattgccacactgagccaggaagtgaactttttaaatgcacagtctcttgcaagcacacttgacactattatacaagatgtttaattagcataaaacaacatataacatgatcagttcagaagttggtaaatgaaactgaaaagttggatttctaaataatcctacattctcaagtctttccacttgaatatcattctttccaccctatttcctccacttcttacccccktttaagttctatggccatattttatttccaggagacacaggggaaatggtctttctaccactgtgattaggagagaaagatgaaaagatttatatttttcaacttcgtgataacaaacatatgattgcattctcaaaactcatagcttttcaactaagtagtcataagtggttgaggataattctttaaattttgacgatgagttggttmctcgtcttttagtttcaagaatggaggaaatttttgcttccaatggaatagaagacatttttctaatgataaatattgtacaattgaatttccaaatttcataatttatacatcaaaataaaagttctatttattatattaagtcaggaagagataatttgagattatatggggaactgcatatattattgcaacataatatatatggtgaaataacataagaataaaagaaattataacagttaagtaacggaagtcttgaagagcaataatccttttaatattaaaaataaggcattcatagatgttgcttctgcataccaaagatgaaaatataatggccatgttgcaaactcaaaaaataatttggatgaagaatattaataagttttgtattatgtataattcacttaaaaatgtggcatgagtcatgtggtggctcatgcctgtaatcccagcactttgggaggctgatgcgggcggatcatttgaggtcaggaatttgaaatcagcctttccaacatggtgaaaccctgtctcttctaaaaatacaaaaaattatccgaacatggtggtgggcacctgtaatcccaactccttgggaggctgagggaggagaattgcttggacccgggaggtggagcttgcaatgagccaagattgtgccactgcactctagcctgggttacaaagccagactccatctcaaaaataaaataaaaatgcaatatgttgtttcatgatataaaataaaataataactctttctctgaattagagaaaagactaaacaacaatataaaatagtacaaaataactatctcagagaactgcattttatcctaatgacataaagttgtactcaagcacttactaatataacatcttgtcaaaacctggatcttctctataaagagttattgattaatgggtagtttgaaatcaaattgtttaaaatttgagtaactccaataaaagaccacctagttttaataataaatattataaaagtttctacaatggattatataatcagaaaacatgttatcattaactatctgagcccataacaaagagcatcaaaattgaagatcaggaagaaaagtcagaatgcaagctgagatttaaattggattaccctgtgaatctgagtgtacacctgtaaaacagaataaataagggaaacaatattcaaccaactcaagctaaccattctttctctcacatgctctcacctagatcattgaagccaaattgcttttgttctcaactaatccgtataatagccataatcctactgcatgctgagagtgtatagatacaaatataagcataaaaattttaaaaaatggcagaaatatttaccttgaaacattacagtcatgcaaattattttactcatctatttttctgattatccttaaagtcaaaagcagtttgagtggtgtgtgtatatatgtggtggtgatgtaaagtcacaagctgttaaatgtttctgtggtgcacaatagatacttatgctgaggaaatgtacaactttaaaggagtgtgggtgtgaaattagtatgaaatggaatgggactctcataatgtgcgtctcctatagaccaccaagactggaagacagcaagaaaggaaaattcctggggtaacacttaggttgggaaaaccacaggataccatactcatgaggaattttaactacccaaacatctgttaggttaaaaaaaattcaacaaaacatgcytcatcaaagaagtttctaaggaatgcaactttatgatctaaaaagaagaaaaccaaatagagggcaaagtacactttaacattatttaaaattaaaaattgtcaatgtgttactaaatatcagttgttttccttagttttttctaaactgtgtaatacacttatgtgataagtgttatagtaacagaggtagaaattatcctttttataaagaagcaattatataatggtaagaagtgattttagccataagtaaataggagtctataattcaagacatttagaagttcatttggtggcagtgcagtattaggatgggctccatcttgctgccactagagaaaataaatatcatttattctagacatgatggttgcacttctgcaaaattagttagatgctgttgaaaatcttctarattagttacacaggactccctaatgggtaattcaagacaacatttctgtcctctaggcccgaatattgaagttattggtataaccacttaggttcccatagacatctcaaactccatattgccaccttcccttgcaagtcttttcctttctgtgtgttccgtgtctcagtttactgcaccactattcatctagttgttcaaactagttatctagaaatcattgttagttctttttacctactctcatcccccacgaggcaaaacctgagtcctattgtatttaccttctaaatatctcttgtatttgtttatttttcttttcaagtgtctctaaatccagacttttacatttatctcttagataattacaaaagagatctaaatggtctttctgctctcattttctaccattcacctgaactcagcatttcaatacacctgcctgaccatgaatttcctctgctgaaaatctttgatcattttctacatgcctgcatgttaaaactatgcccattagtaagttctacaaggtcacttatgatttggtttatatttctcacacatgcactgttctttctcctttatgatccagaatctttgctattctttcttattgtcctttctttcctcctcttctggtgaccagctttgttttcgctatgtttttaagtatctcttttgagaaacctttcagaaatccttatttccagtcccacctcccaaaatttgtttctcaacaagtgagcatattacatcatagttatttctctctctttctttagtggggctttgagttccttaaaagcataaatagccagccgcgcatgtcttatgtacctttctgtcccctgtgcctacttttaatctaagatttgttatgaatatggaagaaaggcatttgactttaatgttaaagtgttacagtgtcaaaattctccatattttaaaatagttcatgctgatattttttaatttttttggtctaatgcttgtctttcaaatgcttgcattgttattgccaaaattaaaattctcttggccagtagcttttcatgtttgatatattcagcttcttttatttcacaaaaccagtatatatttattattattattatactttaagttttagggtacatgtgcacaatgtgcaggttagttacatatgtatacatgtgccatgctggtgtgctgcacccattaactcatcatttagcattaggtatatctcctaaagctatccctcccccctccccccatcccacaacagtccccagagtgtgatgttccccttcctgtgtccatgtgttcgcattgttcaattcctacctatgagagagaatatgcggtgtttgaaaaccagtatattttatattgttgatcattttgtgattttccttttcattaattaacataagaaatataaattattgcatataggaaatatttgtattgcatgtaagaaatatgaattattgcatatagaaaggaaataattattgcatttagaaatatttcaaacagtgaaggaaaataataaatgtccatttcagaatagattggagaagcattaaaaatatctaaatgattaactgagataattagctggtaataagtatgtatagtgagacagagttataatagattgatggtccatgaaagaacaaaggggaagaacaatgtttaaatttagagtgctaagtgtgattacaaagaggagatatatgggtgaaatcataatttaaaggaaatgatagaaagcatataacattaaagtatytaataaagtattcaactatatatttaatgtcaaaagaccttatgctagattatgatgcaaatattctagaatttaaataaaaatacttgtttttgaaatcctatttacataagcaagtagaaagttgtagcaaaatcactaaaaatcaaacaaagaaaagtgtaaagattatcactgtttttttttaaatcatcaatattttagaaagtctgattttcataaaggaaaaaggggaggaaattttctcccyattaatagcttagctgtattttatctttttaaacttcaaatgaattctcctattttctctgagatctcagactaaatttcacattgaattgaattaacttttactcttctgagaatcttctttctgtccattcaacaagaagtgtaaagtaggtgtaatacattgtgaatttttgtctttaacctcagttctaagttctagctcagcattaggccctaggtcagcaaaatttcagctcctatttyttctgcatttaccaagaaagaattctgatttaactatgaaaattccaaactatagaaaaatcctgggattactatgtatggtgtcttggtcactttttgttcatgcctagtaaatcaattgagatccataggctgcacagttaagaatattagcaatgacttaccttactgtgtgtttgctatgtgctggtactattctaagtacttaaaacattgattcattcataagtctttatttctagcacagagtctacactcttagatcttgactaggacttgagcaaagcctcagggtggtagaaaagtaccaagagatggagaggtactaactgatatgacatagagaagctatccaactgtccaatcatctcccaaaacaaattgagtgagaattttgacatgcacctcaaaattatacttttgaggtttctgatacccttgattttcatttttctttaatgatatcctagatattttttaccccaattatgcctgcatacaaatgaacaggagaagaaaatagcaagatttatcctggccctaagactccagtatgacgatggccttacctgaattattccagtttgttccaatgcagagcttcatggtagcatgaaaatggtgatattttatgctctaatggaacacgctgacctgttgttctaaaaactttgggaattggaggaagtgagtagggagaaccctcttcatagtttatccagaattaaaatagaatgaaagataggagaccagtctgtggaatatttgatggcttgatacatgtttccatgttgattaccagctcccaaacttcctttacatctacttccctagtcttcacagaaggagtaattcaatccccttttccaatccactcatttctaagagttgtaatcattggtcatctaatctgaagagcagtgtcactattttttcaaatggcatgtcgacgttatagagcagtgattcttaaacttgaactacagtcattacaaccacctggaggactgttaattactaagccccacactcacggtttttgattcagtaagtctggggtagtgcctcagaaactgcttttctatggcttccccagtgatgttgatgctgctggcctggagacacattttgaggaccactgttgtagaaagttgttttataaacatgatgctattctcagaaaatatgtattctctgattccaaagtaatagtagtaattagaatattttcattcttacctggcatgtccagtattgaaactgagaggttttctttctattttgtattttttttctagcttaagccagtctgaaattagtcaggaaataactcatttaagcatcaaataagatgatcatacagtgaggtctaatactatgaacatccatgaatcattcttagtattcatgaatctaatctgacaaattcttaggcttactgtatttgtaacactattgtgctataccctctgcagcaccaccttgcggttaggaaatctaattagaaaacacacttaacatctcataaaatgataggaaatatttcctacactgacagtggtgwtgcgttttggtcagcgaaatcactgggctctaggaaaacatccaaactacaaaaggatagccagttatcaaagtgttttaaccagtggacaggaatatgtcctgagatactcttgctgtgtggaaataagatgaatccaattgcagagcttcttcagggcccttgatgccctgaattgcttaagacacaggaatccaccagcgagttggatttcttctagtcctgagagacatctaacagtcagtgctaatttgtccaggtgtgctgagtcaaagtcgacttgtagtccttgaagttgttaatatttgtatagctgagaaaggacagagcccttcacttagtgatgacagtcactagaaatctggtggcctagtgcaccaaattctgaaactaaaacaccctgagtggtaggcccttttaataaactttatactgaacttaaattcaaataattgtgcagacaatttaaattgaaggtatatagagctgaagttttctgttttgtaagttgatgttaaaccatatattcatttatgtttattcttttaggaaagtgatmataacgaggtacactaaaaaccatagagtattttctagaatattttccactattaagttagacttacagggatctgcagatggcaaagttacaaataagtctttgaatgtgcttattttaaaagtatagtatcaggcacaacaaaacttgttgattcttaaacaaagtggcatggatgggggcattcaaatttttatatggactaggcaaaatgatggtctatccagactcacctttgagctaacacactcagcatcaagacacagatggatgggaaagatgaccctgacccacataagacccacattcctgtgcaaggatagaagcatgataatcaggaaatgatggttgttagttacagaaaatgcattatggtgaaaaccagggggaaagtgcttatgagaggaagtgattggattatggggaatgagagaataaggatagatcattcctactgagtaaattgctgtgatttataagagaaagggtatagtgatatcttggcccattactgactagattcatttcacaaacaatcctaaatcagaatgtgacagtttatggggagacaaacaaagctcccaaagatgcttataagttactaagcttttaaactggcatattttcaactcctcatacttttgccaccatcagctccatttatttttgtagctgacattcataaatgtaattctgtagccacccttatgtgacactagtaatagtttactatatgctgtgataaaagggaaaatgctggatatattttattatatgttttgggattttgttaaatttcataagaaagatacctaaaataattttatatgtatttaagtatattataatactctacaatactaaaataattaagtgctgttttataatagatgggcattttggtgttctaaatatttctcttaaattacctatgaattaatcaaacagttacctttcattgctccagacaggtgaaacacatattgttatatattatatattaatatatattcagttatataagtttacttttatttttcagtttggatttaggagctctaatccttcaagaatacaagttgacaaaatacattctgaaggaaatttttggcaaaggattcaacacagaaaacttgtgtaacaagacaggcaattttatcaagaactttactgaaaatgcaaacattgtttacagtgattgtttcttttaaaaaatgaagaaagaagggaaaacgatttttggaaaagttcaagaaatggcattaaagcatagctcagcaaggggctaaataccttgcttttttataatgattgatcagtgcaaggaaattaaaatatttagtagtataggtgattatatgtgttgtcatgaatgatctttgaatgtcatttttctcttacctctgcttggggtcacacactccctgatgagagatttgattgctagtattaaaggaatgattgcagggttgacattttattgtgaaagaagagaagttgaaagcaaagcgctatatttctttctgagctggcatacagacacactcacaagccagagttttccttgggaaaactttgcactttgtcctcaaatgagacccgaagaagccattatagagcagagatacagaaatttttccagatacaagctaccgcagaaaaatctcacaactttcttagccgcagaaaattctcaatacatttttcatgatgtctgggcaacgataatgtgccactctacttgcttgctagaatgagttaggttgaaaagtatagtcccaacagcatcgagtagtatatgttacagaggtacatgaatcaaatagatgttggagatgatctttcctttttgaygtaattaattttagcccatctttctggtatgagttagataccaaggatcacagtctatcacagccccttctacttcatggcgtttgtctttttgttcacaatagccatcctaacaaaagaagacattaacgctggtcttaacggccttacattttctggcccccatttcctctcggattctctcattccaactcaactgggcttcagcttcactgtggtccttgttattcttaggacataccaggcgaaatcctgcctcagggtcttcacgctggccattctcctcctggacactctttctccaaacagccaaacagtattcccttacctccttcaaatatttgtttaaatgttatctgcttagtgaggcatgagctgaccactatatttaaaatagtaacgccctaagcatcttcatgcccatgaccttgtctcatttttcaccatggtacataatacttcctaacatggtatataatttacttgtgtattatatattcatttatttatatttttctaatatatattatttgtctctctccattaaaatggaagttccatggtctttgtctctttggttctcttctatatttccagcacttccaaagtgcctggcatgccataggtgttcagtaaactgttgctaaatgaaaagggttaaacagtagaagctttatggatggatccaaagctaccttgatcacctgtatgagctttttgtcctcttagtgcctagcacatagtaagcacttaataaatatttattcattcaatgaatgcataaatttattctcaaggccaactaaacatttggttataataaagacaaggggactctaaaatattttcctgttttataccacttgaaatgtgtggccgatcagaaaattgtttctgtccacactggttcttacagagctggaagtcaaatttttcaaataacattaataataagggagccttaatacatttatacagaggtcatatcccatcmccttttatagagtcagaggcagaagagaggccattgaaacccacaaagcatcttatatttatatttttcaaggcaattaattatgctgatggcaggagacctcttatagctctcatctgktatgtataattacctaaatgaattaggctacaatttgaggcrgttttcctaggaccataaagctagcagtaaaaagaatgaaaatgtctgtttatgcagggtatgtgtatgattccttgataccttagttgttgcagaaactgtgtacccaattctgtcttcatcattagcatctcttagctcatcaaatcgaatcctggagcattctttctttaccctctcccctggatgttttcttggcaatgtaaaactggatctttgagtacggggtgtcaatgttcagattattgtacagttttcagaagtacaaataggaagagtatctttgtcactccaaaggtatttgttcactgaaagttcctgaaatgtattttctagattcctgtatagttatattcaagtactattattaaaatatgtcaatgctattattaaaatatttttggattgagttgtgcacctaaattccatagacataatgttatatgcctaagaaatatattctaaatatcaattacttattcacagtttaaagattgtcaccactattaatctcttagtctgttttgtgttgctataagaaagtatcagagacttggtaatttgtaagaatagacatttgttttcttatagttctggaagctgggaggtccaagatgaaggtgcagacagatttgcttatctggtgagggttgcaccctctggaggggaggaacgcgtgtcctcacacagtggaaagcagaagrgcaagctatccaaatgcttagtgaagcctgtcttataaggaccttaatcccattcaccatgggaggtattctcatgacgtaatcacctcttataggccccacctcttcataccatcacattggccattgtatttcaacatctaaattttggaggggacatgttcaaatgatagtaacatcttatagctctctagtattgaaataaaccttttgactctcttcagagcatgtgattcacttgaaccagatatactgcccatatttataccatcccaacttgcaagaaattatctgcaatttaaaaacaaagacagaaactttctccattctgatcctatttgcctcattccaagctcatctttccatttgccagataggcctctcagacttctggaggttctcaaactcaatgaatatgaatccaaatttgtcatctcctaccatagtcttaccccaccaaaatcagtgtatgttcctgaatgtgctgttgtgaactgccaaaattcactaatattaatgcatgagttagcttttactactttctctatctcaatttgcacccacatcaaattattccgagttctttttattaatctttctatagtgactctaggtttcatctccttctatctatcccttctgtcactattcttatttaggatctcatgttttacttggccttttggaaagagcttatctacactcagtgtttttcaaataacttaactttttcatagttacctgagttgtcttcctaaatcaatggaaaaataattcttttctcaaaaacctcagcggaatcccactatttaaagaataaactccaaattctttaacgtaacaatcaggtactctctagcttaattcctaaattactacttgggcttgtacatttttattcctccataaatactggtctctctgtgatagttctgtttcttggatttagggattctgaatctttttttgtaccatgaatccctttggaaatctggtgaagtttattgactccttcctagagtaatttattttttacttgtaaaataataacattaccaagataagcaattctacagcaatacaactctatctgtctgtgggtcctgttgtttatgtctttgtggcttttctatgatcctccccttatcacagaagtgcccctaaccctgctctatccttctcatctatcaaagactagtgcaattcccaccttcactgtgcatctttaccttgcaaccctgccccatctgtatcatcactttgctctctcattgtagattatatgttatttatttctatttatcccttatctttatcttttatgataccttggtaattgacaacaatgtggcaaatactgaactagccacttttacatactttgttttcataatttcttttaaagcactataaaatattcatatgatggggaaactgaggtccaaacattttggtgtttcaccaagatcatacaacttgtattcttgctagattatgagttatttgaggaaaggaatatttcatcttcctgattatatcttctccggatctgtgggatagtactttttcaataatgtttgcccatatgtatttaaaaattgaaaatattgggaaatacttatctctcaatatttaatatcattagaattgactaggggccccaggaggacagaggtgtgtgcagcagtgttcttaggttaatgtctgtgtgaaattaactgtggctaaatctttccctgcatactattatctctcctaattcccagtggcttcacaaattgaaattgtacacataaggattttaaacagaaacatttttaagatattgtctcttgttttgcgttactgaaaaaataacaaagtaggacaaattaagaaagtagaacaaattaaagaatttaattggagtcataaggaattcaagaaatatttgaagattgcatttctaataatagatcagaacaattgaataaccatttcatattctccaccctcagtgaaaacaataaaatcaactcaatttacatttgtaaaacaatatatgtatactttcattataccagttttaattttcagctgtgcttctctatctctctgtagtcaaatactacgtttctgcaagggttttcttaaaacagcattgctaggttaactgttttaaaataaaaatatttgcttaaaaaggtttactttagcaatagtaatgctttcctttcaaaatattatttcaagttttaaaataatgaacttatgattttaattaattamgttttcatgtggaagttgttcatctagagtaactaattttaaagaattggatctttttatttggtaatgcctttagcactctgtgaaatataaattaatgtaaaattaaaattaatttattatgactatccatttttcatggtcttttctattaytgtgctgtagcaagtactaattctaatgtagctagataattaattttctattgtcatagctccagatggtcctcctgaaaatgttcatgtagtagcaacatcaccttttagcatcagcataagctggagtgaacctgctgtcattactggaccaacatgttatctgattgatgtcaaatcggtaaggcatgtcttaccttctgtaaaagccagtataaaatggttaataatacaagatttggaaccagactatttgaatttgaattttggctctgttagacagtaggaaaattactttacttgtttgtgtttcaatgtctacatctgtaaagattaataatagtaaacagggtatgaggactgaatcagttaacatgcataaagaacttggaacattccctgagatatggtaaatgctcaataaatataaratattagtaacattattataatatgttttatcagtgtatagaatgtgtatatatatgtatgtatatatacacacatacaagtggttaaattggtagtaatacaaatatctggtttacagtacggtagaaagtaattcataatacaaaatgagaagagagaaggcattaggagaaatatcttccagataaaataacatcagagctaagtcttgaaaaataagtgaagcagaacataaaaggtaaatgggaataggggtgtaaaaaagtaagcctcattcaagaaaaatcaagtcttttggcaatcccaggctatagcattaaaaaaaataagttctaagagatgaggctagatccagaggctgactatacaacaagttacagagttagggttttatgttaagggcagtggggtgccagttggtgatacagatttctactgtataacataggcatggttgcagtgtagaggatagattgagagcagtatggggggtgtaaaatcaggcaaggagacaggaaactataaaagggcaaggaaaaagaacagaggaaatgtagcaagagaacgaatgaaaaataatctaaacctatagaatttggtgaaaaatcaactaactcatgatggtgagtgagtaggataattaaggatgattgtaagttatatgacagaagattatgaggaggaacagatctgtagaggaaaggaatgagttcagtattagacacactgagtttgaaatatgtggcagtcctccaggtcaatacacccattggcagtattaaatatggatctggagctcaggagagaaattctggatttscagatttgggtaatgttagtatttagaagatagtcaaaattatargagtgaatgagattcactatggaatgtgcaaagtaagatgacaacctaaggacagcaccctggggactatcaacacttaaataagagrccattgaagagactgaatgggagtagatagccatttggatggaaatccaggtatgaaagtcaaacccttcatataagataggatgctcaatgatgtcaataatgcagaactgttagccagaataaagactggaagtatttcctttgcaccctgcttgggttttgctgggcctgatgaacacagttttctaatagcatcttatgcattaaattgkatagcatagtgatttctcctcctttctctctgtctcttgaccaactttataattttattatgtctttgtagtattccttaaatggagatataatgcttctatctcaaaagacctgtcatcattaaaataaaattgaaagaattgttgatgtatttgttctccaattcagtctctattttctgttccttttgtagagcatatttgtgaagattttagtatgtaattagccaaaaataattagcacgaatgatgaatgccctgggaatatgcattaaaaacaaattataaaatgataaagctttactctgtcaaatgaaaggcactttattaatgaaaatagttctcccttggaaattctgcttaaaggaacaaaaaaaataaaacatattaagaagtgattttgtaatctcattcttgtagccttcttgctgagtttcaaagtgagcaagggaaagagggtagaatgggaagataacaaatattttaattgcttattttctacaagttacatgttcatctcttcctattcattatcttattatatgttatccagcaatattttcatataaacattattaccttcattttgcataaaagaaatctaaggaacagagacggtgaataacttctcacagagctaagacttggctaaaactaacagatcaacaatggtttgacaggagaaagggaaggtcattaaataacaaataaaattcgccaacataaatatagcctcaccaaaactcctttagatcaacaatagcaagaacagattcagatagaacctagtaattcacagtttctttaggattcttggaattaagtagaggtatttccttccttccttccttccttccttccttcctccctcccaccctccctccttcccttacttccttccttccttcctcacacattttaaaatacttccaatgtaccagaactgtgctaggtgctggatatgtagaagtgaacaactctgataaagcacttctgcagctcatttcattaatatgtaattatcaacattcaagaatcactggttcccagactaaggaagaatacatagcattgcacttgggacttattgtgcagcctgtcttctacaaaatactagccacaccgataaaactcttaactttaaaagtgtaaacaaaaattgtcaatcttaataaaatgtaaatatcatcctagatgattctgctggaaattaatgcatttaggatcattttcattgttccttttactctttgactgaacaaattgttatgagtagcttctgtgcatcaagacaaggatgaaaaacataaagctctgctgtcaggtagctcacaccctagtggtacacactggaatagaaacagctaattatagagtttgaggtatgaagttttgtggggaatataaggtaacaaaataattaaagttcctgttatgggaggaatagaagataaaggagacttcatagagcaggttaaatatattctaggacttgacgaatgaataggggtacacaagatgggaaagggtggaggcggggtaggaagagaaaaaaaataggaagtggggcaggaagaggagaaccagagtctaattgctgataatgaatataaagtaacacttcaaaaatgatgaaagacattttataacaatagattatcaagtacaatatgagcaaacaaacttggaattgattgaaggaaaatgagtcagaaagatgtgatttcagtcctgggtaagtggacaagtaatagctaacaacaacaaaggtgtagtaggtttaataaagaaaggtaatgatgatcttttgtactgccaratttgaggaccgagaattcctttcaaattttgttaaatacttttaaagatataatatatgcgtgccatgtcatattttgcgacttgatatttgttatctattgttttaatggaaggcattggaagagtataatttataaattatacttataaattataaatttataatttataaattataaatagttaaatttataagatcaaacccagtgaccttgtggaagtgtagaattctatggactcttgaaagacctgggctcaaatccttcctctgctactaagtaacmctgaggaagtcaccttacctctataaaatcagaattcaaatagctataaaagacaagtgacatgaaccagtagtcaaagtgaagccaattgagtggggctccaatgaatgggacccaggcccctttacagaggtcaatagttacccatctctgcacctctcaataatattttttcagcatgaaattaagcctagtcttaaggaaaattacaaaaagcatatttttatgtgatattcaaatgttaacaactagttaaatacacattttctgccagtggcatatattcctgatcaataggatttctacgctgatttgtttttcttccattttcgagaagtggggcatttctgtccactgctctgtcttaaggtgggaatgatctatttgactgtatgcaacgatagtattatttatatcatccttttactatgtttcttttttttctttttttatagcaacatcttttttttwaaaaaaaattgagttaattttatttacattacctcagcaaacatctctataaatgagtttccaggacaacatttacaatatagttataccatatgcaaatcaatgtgtgtttcgccatattatcaataaaatatgttcttagcaaagagcattaaaagaatacattgaaccaaccaaccaaacaaaaaatatttcaaagttataagggaaggtcaagttgaaaatggacttaatagtgttcactgtgtataaaacctggttttaagtgtttcaattaagatacctgaaagtagtatgtatgataggattttgaattttctcatggttatcttgggaaaagcccttctacttagtgctagcaagtttagttatgtttaatatctggagtgaataggccagaacctccataaaggacagactatgtttgaacaaatcatatagctacatttcatatgcctaaagacactcatttatgcacattaataattatgacatccacaattaattactatccagtgctacacatagtactaaatcagagtttttcaaactgcagccatcatcagaatttttaaatgaggtggaataaagttaaaaagagcagaaaatatcaaagtgtacttcagaaagatggtgtatttctgaaaaatgtgttacagtcataagatacgtatatattttatatctatcagtcttatcttctgaattatgttacaaagagtgtttccttttgtgggtaatggtgaaaaaatattgaaatctatgtgccaactactttagatttgtcctttctaaatctcagtgaaacactgtaaatagttgttattagcccaattttacatgcattgaaagactagactgtgtaggtggtttctcaaatactacaggagctataagtggccaatttgggatttgaggcctgtgtgattaggtaccaaaacctctatgctttcttctacaaaatattggagtcaaaagtagagtttcattgactgcaaagatgatttttgcttatttatttaatgggttggttaatcacggttggctggtttgtcttttttcttttactttcaactattaaaataattaataattagtaagctgttataatagcactttagatttcccagagcaatctgattgtaaaataaataaatacaaatttggctagataaatacatctcacgtagctttgtattattatgttttggtgactcagatttcaagtgctgcttccttaatttttacttatattttcctataggtagataatgatgaatttaatatatccttcatcaagtcaaatgaagaaaataaaaccatagaaattaaagatttagaaatattcacaaggtattctgtagtgatcactgcatttactgggaacatyagtgctgcatwtgtagaagggaagtcaagtgctgaaatgattgttactactttagaatcaggtaaggagaatttctcaaccttgctaaaaattgactgagatttagctggctttcttacagttcatcatactccaccaaaaaaggatatgtgttatgagaagtttttaaagcatataaacaaaaaaattagtgrctctctgcaactgacaaaaaggaagatttctatttatatttttgaggtaaagaggagttatgtagaatattcaatccttgtaaatacagcaacaattaaaggtatccgctgtatttctttgcacttatttaatctgctagttgtttcagaaattaagtaagcttgcctaagagataatatttccaactgtctatatccaataacacttcaactaaaattctatttcaattatttctgtcccattatttgaatgaatattaaacttgtaatactctgtgagtattaaataatctggaattcgaaagtagaatccagctcacatttatcacagctgttgtcttcccttagtcaagtaatatatgtcttattatataactctttgataaatgtcagaatacatacagatttcctcaagttcttatgaacagggtctgaatgaataataagattgtaaccaataagaaataaatttggaaatcaacatcccagaacttgcttgccccatcctccttcagactcctgatgttctttgccaccagatatatcattggaaaaagcagatgaagggatatgttgctatagtttatttgttgctatctgtaaggtaagtataggaagtaaaatttttttacagctagtttttttcgttacattatattctctatgcattttgtctgtaaagttatggttctaaattaaaaggtaaattttattatcagcatcctaaaattccatttgttcctattcgtctgccaagtatcacaggtatctattttctgattatgctttttacttctcaatccctcctacctgtgaggaaagatatgatgaatgtactcacatttataccataaagcattgtttgtcaaatcttaatgtgctatctgtttcaaggatatcacaatttaatacatttttactaaatctctaagagtagaattttatgtgtataaccaaaaatctgggtactaggaaattttttacaacattgagagaattccttggtttatctgacttaaaatcacatcctaaatttagagaaacatctcataagaaaatatatttatgacacagcataaaaacgtgtagtaacaaatgcaaaaatatctctcttgaaccaacttaacctttattttagctttgcatttttccatttaaaatgaaatatttgacacaatagtacgtttatctgcttctctctcttttattctttgctgttaatttatttacattttttgcaagataatgaagcttgaatatctgaactgttgacagccaaatattacatttcttcatggaaattctttacttagtatggaaggatataactatttcaagttgaacaaaatagatatagtcattcaatcagtcacttatataaagaacactaattatgttatgcatcaagaagtagctcctttattcataaaataacttttatcctcatacatattttaataatgtattggtgcttagcttgtcatatgttaagctgttatttatctaaaataaactaaaatatttatactatataaagaactcttaaaacccagcaatttaaaaaaatccaattagaaaattggcagaagacatgaacagacatttcaccacaaaggagacattgttggtaaaacaaacaaacaaacaaaaaatgacaacataagttttcaataccattagccattcggaaaatgcaaattaaagccacaataaggtattattgtctatgtactagaacagataagrtaataatttaaaatatggcgatgatacccaatgctggcaagggatgcagaaagactggacctctcatacattgctagtaggaatgtaaaatggaatagccacaatggaaaataattttgcagccacttataaaactaaacatgaaattactgtgtgacccagtagtcacactcttgggcactgatcacagagaattgaaaaattatgctcacacaaacatctgtcaccaagattgattgcagttttattagtaataatgaaaactggaaacaacccaaatgtttttccatgattaaacaaactctgctacatccacaaaatggaacactactcggcaataaaaagaagaatgtactattaatacatgtagtatccaccttgatggacctcaaggccattgtgctattgtcattttcaaaatgacaaaactatacagaggaagagttattagtgttgtgaagaagcatatactgcaaataaaagaggatactaggagagagtttctttagggtgatgtaatagttttatatcttgtttacggtggtggttaaaggaatctatacagaagacaaaattgcataaaagtataacaaaacatggaaaggggtgaaattgggataaagtctgtagcattaacagtattgtaccaatatcagtttcctggtttcatataaactccagttacataagatattaccaatggggaaaactgggagaaagttaaatggtatgtcctgtttttgccacttcttttgactctaaattgtcatgccattgcactccagtcagggtgacaaagggagaccctgtctcgaaaacaaacaaaagattaaaatgtcatagaaacacattctgtgtaaaaataagtgcatataaaacaaacaaactggatcaccattatggttgctgtgaattacagatgtcaatgattctataatgcgtcagtcattttgctagtttttgcagtttatatggtttaatttgtggaatactctttaaaaacagaagttcaaagcaaataaatttatgtggagataaaaaggaatacaatatttttaaaaattaattgttaaatattttattttagccccaaaggacccacctaacaacatgacatttcagaagataccagatgaagttacaaaatttcaattaacgttccttcctccttctcaacctaatggaaatatccaagtatatcaagctctggtttaccgagaagatgatcctactgctgtccagattcacaacctcagtattatacagaaaaccaacacattcgtcattgcaatgctagaaggactaaaaggtggacatacatacaatatcagtgtaagaatccgtagcttcagttaattacccaaatgacaatgtcagtttatgaacttggcatttaaaaatattgcagtttgtgtacacatgacatttcccatatctttttgtgagattgtttgacatctcaacaaaaataaattttgagaactgaaattacctattttctgctataatacaagtactattaaattaaaatatgtaaataaccaagaagtttgcacaataatagtagaaactcagacataaaagagaaagaaaatgcacattaaaagtaaaagaacagtgatatataaagagataactctgcctaaaaaaaagctatatgattatgaatttaaaatggaaaagcaaattttaaggacaaaagacagaaataattgtttacctgtttaaaattctcatgcattttaaccaagtattactaaaagctaatagcattttatgtcttaattctaaattccctatatttggacagaaatgtatgcatgagttcatatacatacacagagacatatacagacacaatttgttttattccttgcctacttttagatcatcttgaaattttcaaataaaattatatggttcagagaaatcatcttctaagaaacagaatttactctaaatcttcaagtagtttagtaatctgcctaccaactcttgattaatatcaatgtaattatcaggtcattgataataatttgtatatgtatatgtgtataaaatgaatatatttactacttctctcagtcactttgactttatatctttataaaataaatcttttggggattctttttgcatgtcccattaagtggaccaccattgtgaaagatcgattagagggaagacggtgactaagagaataaagtaacctgggttcaaatactggcgtctgtgccagggcagctttatcaaatctgagcccagttttcttatgtgaaaaattggtaataggaataataacttctttataggatatttgtgaggattaaatattcatagttatggtaggtagtgaatggtacatatattttggctattggaagagagaaaataggaaccaaaaatgtgcaactaattaataatttttaaaaatcctgtttgcagactgcaatttgcagtatccttaaaaccttgaagtttgttaggatgtataactttagcacctgtattgacctactgaatcaaaatctgcatatttgcatttaacaaggtgtgcgaatgacttctttgcacactgcaatttcagaggcagtgcccaaattttcacttattatttcacttaaatgttagattctaccataaagaaataaaaataatggaccatactataacatacgttttttatttttaatactttttttttgaatttacaaactcaaatattttctctaggcattttcaagccacattttatggtcttggtttatttatcatatctaccacatgtatattgtaatattaactcaataaaaacattttaaaagtatctagagtgtgggagggtgggccactaatatataaaacaaattaagtaattccaataaacatttcgtatactgaattgggtttatcgagtacaatgaaataagccaagaatatagtctctgtttaatatagcaagataaagtgaagaaaagaagattctctgtctacagcttccttagcacaaagttaattgaaaggattcacgtttgtgtaaatcaccctctgtgtatacaaacagaaatgttttatgtgtatatgctgcattatgcaggttatagcgtcagatactttggggcaggggtgaagaagggcataaaggccatctttcaggggaatgatttaatacaggaaaactgggaggctgaaggaataggatttcatcttagagagggaaaaaaagaggatcttgaatatggatttacagaaggccagagttacctagctacagagagaaggaacagatgttagagtagatgaagggagagcgtagatacagtggctgtagtgctctgttcttcctacattcacattaaaatcatggtcagtccaggtctcagtgatagggctgtttagatcactcagcctttgttctcagcgtttagtaccagaacatcaatttttagaaatacttcattgttaatgttcttcctacatatattatattcaagtgcaagaaaatacaattaatagactatatgcagttgttttttaaagaattatttaaaattacatgtwaccataatcagttttatatatatatatatamctatatatatacatacatatatagatacatgcatatatatatataywcacacacatacataagcaatcacttgaaaatagtaacaaatatttgtttgttttaggtttacgcagtcaatagtgctggtgcaggtccaaaggttccgatgagaataaccatggatatcaaaggtacatacatgagctaccttcctatgaaatgctattaatcagtgattataatttaaattccatacttgaaataaggatgtagacaagcctttaagtgataaatatgcatatattaagcacatactaagtaaaaatgtgtggttattaaagctatagttaaaaacgtttaaatgatgatgtgaattaccatgttaaataaggagaatgtctttattttatatttctttaatatattttatatttctaagtttaaatttttaaagacaaattttatagtccgttatttgatgtttctttaaatgttatcgaaaagaaagtgtgtttaaattgcctatcattagactttgactaggtctaattagattattagattgtttgactgatttttattttggaagtgagattctttcagttaattaaatagtgttttttgaactaccatgtaggttggtttatgattctgacagtaaagtaaatctatcaattcatgattctggcaagtattttttatagaaaatataactaaaatttgggtcatcctttcaaaataaaacaaacaaacaaaccatgaaacccaaaaaagatgattaagaggaatttagggccattcgaatgatcacggtgccctctcttcttgagagtgaaaaccagcaggtaataattatgccatctctctaaaaatgtgtaataaaaccttcagagaggttttaaaaacagaagtggatggacttttagtagaattctacctgatatgtctctttctaaagcaaaaagtaacttttttcagtctttggcaaatacagcagagcacagtgattaaaggtgacagcattaggctgggtttagggtcaaactgctggattgaatcatggattagccacttgatatctatttgactttgagaaagtttcttaacctctataggcctgaaaaatggagataatactrgttcctatctcaaagttactaactttgaggattaaaagagaatctgaaaaaacccttaagacccctgcctggaaacatgtactattaagaataaaaaatattcactgttagatgaaactgataaattttatctttttgtcaatggattatttatataattgtgatactctttataagtgtttgatttaaattgataaattatttactttgggaagtacaaatgcataaggtctttaaaaacatcaattatttcacaaaatgacttcacaaagaatagtatgagtcataccttttaaatttatctttgttattcagtggcagacgtgtaggtgtacagatagcaatacatgcatcacttttatgctttagtaaaacttcccatttcagatgctattcccatccccatgccaggttggttaatcttgacttttactccttacctaaggcaggcagacttacgacttctagtctagagaagatatatgaacaatgtcttagtggtgggatcctagagaaattatgttttctctactaatacacattattttattaatgatgtggaatattcaattggtagtagtctcatgaaatttgcatttgacagatattatgaagttggatagtaatgtccaatgctggattcctctaactggaaatcttttcctggggactcccmagtggcctggctgagaatctcagaactacctgaaacctgagcctcttcctactgaatcctgcctttcatcttcccttttacaggtgtcatacctgtgatctgtggcacttactccttccctctgtcccttaattcttcacagataattcccccaaaaaacctcttacacatccagtctcattttagcctttatttctcttagtacccaaactgatacattgagtaagaaatttgcatttgaatctgatgctcaaaaaagagtgaactacagaaccgagtcaaaaaaatgtgattcaaatgttgatagttatctttgataactgtatgacataagctcttttccctatctacaaaataaaaacaatgttgataatcctgtgggattattgagaagctttttaaaaaagattcttaaaaatatggaaattgaaatttggttaagtaacttactgatgctcaagcactacattcacacacacacacacacacacacacacacacacacacacacacagtgagctataagaccaaatgaaacaagcagagcttctatacatatattttggagatatttgtatgcattgatgacaaattatgaattatcatggctcttctagaagttattctgttaatctgttaaggttaaaagtacatatatcttttgttctagaaattctgctcttaggaatctatttcatagagacaaaaagatcagtaaataaagctcattgtaaaacaaagctaattattgtaaaacatgtttaaaaactggaggaaaagtgaattcccatcaccagatgaacggttgaataaatatgatgcagctgcaccatgatatataatatagtcattaagaagaatgagttagctctgtacctggtcacttggaaacatttaaccaagttatatttaagcaaaaaaagcaatatgaggggtaattataatacatactagagccccattagaaaaagcaaacagtgagaagagtgtgttgtgcatgactatttatgtatttttatatgattatgtgaacatggaaaaaaatatgggatgctatcatctagatgtttagcatggattaactgtgggaggggtgctagtatgactagaacagaaattagtaaaccagctaaaagaagcaaaagaaactacactaaaattatagtaaaaagtaaatatgtttatgcatttataaaaaatatatatgagtgagagcatrtataaattgaatttttaatatgcaaagaggagtcaggtgcctgaaaatcacacctgggctctattatctcagggaagtctcaaatgtataattatgctttcaggagataataattgctaaatgtctgctgtctccaagcacaattctctataatttgttrtttatgtttgtcatcactttatctgtaaattaactgcatgaaaggagaaagattttttcttttgttgatgaaacaataacatcaattgcagtgatatttcttctttgtttatagctccagcacgaccaaaaaccaaaccaacccctatttatgatgccacaggaaaactgcttgtgacttcaacaacaattacaatcagaatgccaatatgttactacagtgatgatcatggaccaataaaaaatgtacaagtgcttgtgacagaaacaggaggtatcatcacatgtcaatttatcttgttaaattgtggagtgtagattactgagtgctaaaaagaatttagttcaaattaagattgactcccagttatcacacrcctcttgagattaatagattgtcaatattattattaatgataccaatcatttctttgtaaataaataaattatttatttattttatttgtaaaacttttataaatgtcatttatktataccaattatttattcttttttacctatcaagaaaggcacagttaaaatatgtgatttattaattccatatactagtagataaacatgttttgattttggtaagatggaatcttgatagcttctttggaggggtgaacaagtgagttactcttgattgagggatgctctttctctacctgataaatcatcctttataacagttcctgtagattcacatgtaacagagaagaacagggttacctgcctatacaggtggatcacttgaattatctctggtgactgatgttgcatcgagagtccccttatacaattataaaaacactatttataattgtaaaaatatattcatatgttacttggaattattgttctctttgtttctgaaaacagctcmgcatgatggaaatgtaacaaagtggtatgatgcatattttaataaagcaaggccatattttacaaatgaaggctttcctaaccctccatgtacagaaggaaagacaaagtttagtggcaatgaagaaatctacatcataggtgctgataatgcatgcatgattcctggcaatgaagacaaaatttgcaatggaccactgaaaccaaaaaagcaatacttgtaagtataggttatatctaccatgcattctgttagcaagctagttagtatctttcatccatccatctgcctgtcctttcatctttccaataagcactggatgtccgccacgtatagtgacctgatttttctggcactaggaatagaaagataaactgaaaattattcttacattccataaacatacagtattataggggaagcaggcaaccctaagagtaattatgatttgatataagttacataaagaccatatgaaaaatgtgctattggagaacataggtatataggagaatttaattctttctgtagaggacaatgtgactaatgtgtttttcacttattattttaccatccatgctgatgtacaggatttttgaaacactatcctatcctttgatttaacagtggcttccctttatgtcactcataacaataactctctgctttttatctcatgaatgagtgatagaaatatttaataccacctttaatatttagctttttgtagcccctaaaaacccaacattttaaaatcaatttgatattttggctgtattaaattatttgctaaattgattatcttccttttgaattgattatgttatttttgtattgtaagactacaatttttaaaagaatcatcttatccttgtgtgattttcaaaatataatttttactagtaattttttaaatgcaggtgctttcatttgtgcctgttagttaaaacattatcaaattctttacaaatatcctaagccaagttaacattggaaaaattagagaaattaggcaaataaaaataatgctttatcatctctattaaatgcaattactttggttcaaattctaggttattgcctgaatagctatacacatatgatagttataaaaatgatatactaccaagtatcatgtttattcatatttatagtttatttattttgcatatttgttcctgaaacagactcttcatataacaaataaaatcataagaattttataatggtagaggttcaatcatgtattgcaacgtattggttttatgtttttaaatgcccttgtgcctttatttttaaattaagtaaatttcaattgtctctgaggatcttagattctttttgtaatttttaagcttgatcttcttctgtatcctttacttcaaatgctatggaagcaaaaaagtatacaaatgcaactgtgcacacacagaaataacaaacattttcttaatgtgtttatatgtgaacaagacaagttctatatcatcattttaatctaattcactagcatttgcaaaagtgattgaggyataacagttatgccttttatttataaattatgttagtgtaacacccttcacagatatcaaatcattccatctaaacaaatccttgaaggaggtgagctgattcagttgttcaaactgctaactgctcacgagtttaccaaatttttagcccctgcctcatcaaattcaatgggtcaaagtacgagataattatttgtctcatataaatatagcatatatttctcctgatgatgattccattccaaattttcatcttgtaaattcattttcttttgaattaaataaatagtttttataattacttcttgagttattcataggaaaaatcacatgatatgcaaagtgttgatttttctttttttattttatagatttaaatttagagctacaaatattatgggacaatttactgactctgattattctgaccctgttaagactttaggtaagacatttttgtaattcatttataatctcaacatatttatcaaagttggaacatttattagtaaatgtattaatccatgtctagatgttttaaaatataaactcatttaaatgttaattagcctctctagtaatatttgtgggtttttaaaattttttcttttaggtttaggagtacctgtgaaggtttgttacacaaacatctgtcatctcatcttaactatcctttaagttaggtcagtgcttctcagagggattttataccccaggggatatttggcaaagtctggagccatttttggctgccataacaggatggtagtggtggtggtgcatgctactggcatctagtgggcaaagattaggaatgctgctaaatttccacaatgcacaaaacagcccgtaatgtcagtggtcctgaggatgagaaactctgacttaagccctaatgttgactccattttacagatgaggaaaccaacacccagattctttcagtatttaagtggctaggccaggattccaacattacagaacaggatttcataacattacattacaaatatgggatttagacctgggttcaaatcttggctctgtcacttgagaaaataatttaatttctataaatctgagtttcctttgttgggaaaatattgataagagtatcatccttgaggggttgttgaagttttgtgtaaaacaacatatataaatatattaatattttatagttagtaaatttttaaagtttaatagcttttttggataggttataataaaatattttagaaacatttttatttaggagaaattatttctctagaatttcactgagaggatcacaacattctacattgtttgtgccaggccctcaaaagccccagtttattcgtcttaaagaattgcatgaacagggtatttctggggcaccacttgaaaatgtaagacttcatgtgttgcccagatcctggcgagctgttgctcagtgtatcttgaactgctaatagacttcagtgagagttatgactggagaaagacggattgtcccaccatttttagccagaaattctcattgggttatggaaatactaattgtataaaaagccagcctccacagcctctacatgtagtcaaggaaactttgcatcttgaagaaatagagggggcatgtagtttgctacatagatgtttgtagagaaataacaaatttctttggctaaaatgtttgtttaattttatacaaatcattggtttgattaattttacccaataatttcatcattttaaagctagctgattagttttgtggttttgaaattgtatcaagtgtttcttcatttgataggtgagtctatcacactctgatgccaccacagtaaaataaatgtcttcttgtcatcagcataatttcctataggttacagcattcataagccattacttcagctaagtagtgatcctggtgcatttgccaatggaaggtaaaagacctagacaagatagataacccatgtgtcttaggagataatattttataggagcagtgctgaaaggagctagccttgctgtattgtatgatgttgtctttcatcaacttactggtttcatacagattattcatgggaaggcaacatgttccgtcagttatctgagaggcaaagttgagacattcagggtaatggaaatgagaaagaaaagctataaaagggggggagcgccaagcatcaggaaccacagtgcacaggagcatgattccttagattctgctaaatggcttctctctgcccaatgatggcctcatccagcactataagtaatctcaaagagctcctcagcaatggtcttctctttcttctttccactcacagtcaaggtggtggaatacaaccattaatcctggaatgtagcagaaatacacagtcaggtttttgattccttctttggaagtataaccactgccaccccaatcatctaggtatgaatctttgtgtgctctggaaacagaaggagtctacagtgagtaaaagatgtgtaatgaaggacagagcacaggatcctgccaagactaaggaaggagggactggtgaaatgtagactggacacaatatatagaaaggcactgggctgctgagggatagtgacaaggaagggtcctatgtgtctatgatcaaattactcagagttcagtgtattttttgtagaccagtgacatgatgacagtcttttaggttgctccttagagtgatcttccagggactctctcctgagatacagcagctttgttaattggcctttgccctacagtgcttattctggattgaccacatggagttctgctatttagatagtcatttatagcgagtaagacagtgacaagtggaatcaaaggaacttgcttggtttgtaatcgttagttgtagtgaaatgagaatgcacccctggagcagaattcctcaatgactagcaaagcagcccagccatttctctggttaatggatttaacaccatcaattactgktgtcatatttgctttctaccagactattgagtgtcgtggttctatggagattagagtcactttcataggtcaagaaacaaacaacatcccctagaagtggtcctggtccatttgacattgatagaacgctgtagatcaggggtgtccaatctattggcttttctaggccacattggaataagaagaattgtcttggactacatataaaatacatcaacactaacaatagccgatgaaccaaaaaaaattgtaaaaccatatcctaatgttttaagaaagtttacaaatttctgttggcccacgtccaaagttgtcctgggccacatgcagcccatgagctgcgagttggacaagctcgccacagattcaaaagagttcttagtaaaagaacattgccagggaagaaactctagaagaactcaaaaagaaaacaaagttgatcaattctccaatggttagtggcaagaatggtttcatggttgtgagaatgaaggcaggcaaataataaagtgcattcatataatacccctggtgtcatcagaagatgacaaagggtgattgagtcctttttttctctcaaatatgtcatgtgttgggatatatgaatcatttgcagcaggctagggactcaaacattcctggtaagctgctgaagacatatgtgtgcatgtaatcccagactacagagagaagtctaggtcccatcaaggtcatccacccaccaggggataagcattcattcactggtattttgcacaccacaggcaatgagcactaagccgagttgcctgtctgttgaaactttgggatttaagagcttttgcacgactctgtttccacagaccattgtagtggtaattatgcctctcagagacgttattatttggagtttaaaattaggggcaaaagaatcaccatagactgataatcttaaaaatgtttaagtttagtgaaagggactaatgaaagtacaagtgagagatggccaggtagaacttcactggatggataagtatgagtctgtggaagagcagtttgcatttagggaaacctttctggcctgtagggataaacagggaagataacgtatgcattattttaatcctaaataaatacttgaaacttatttgatttcgtttttactcaagattgagtattggcatttttattatcaaaattcacaaaaaaccctcttaaactttttgaaaaaatcttccctaggcacatcagtttatggaaagtgcttgtaggcaatgttttgattacaaggtttaattatagagggatcctgtgatttgaaaaccagacacccgtttctgtaccttacagggctctcattaaagctgaacatgatgaaatcttaaaccccatggcaaaggcactctgtgattgttttcttttgtcataacacttctcatttaattactatgctaacaatgaaaagttccaatgtgctcacttagattcagaaatagggagttgctatgtatcttttgcatccaaaggattacttccctaaagtcaccagaggaacagaggaagattgtattttgttaacgagacagtggtaatgtggtggtgaacctcacatactctgtagtcaagacagacgtatttcaggcaggcttggtatatattgaatttatgagattgtgggttagttacttaaaaaattatttttaagttctgaaatcttatttctaaaatgagaatactaatactcattttagaagctaactaggagattaaatcagatgaataaaatggatgaataaatatgaaatgtttgttaataaagatacctgtcattgtttatgtaccaagtctttaaggggttttacatataaactcatgcatcttcactgcaactctgtaacaacacctcctatttacatagcgccaatttctaggtaagaagtttgaagcattgtgttttttastaacttgaccaagctttttaaccatcccaaaggtggtggcagaacctgctttcagacccaggcagcgtgacctcagtcagtgctgtacttgtaaccactgcacacactacctgcaaatcactaagtccccaagtagcccccagttcattactatgggtgatgtttctgctcccacaacctatctttgctgtaccattttctcttcttgatagttttaattatttctagcagctctcttttctcacactttgtcttggcttttgagrttagtgttcacagataagcatgtgttgcttttgtgtttagagatatggtttctttttatttttttaacaccraataatgtgacttttctcacaccctagcaaacactttattagctacctttaaattttttcctgtctgtatggatgaaaatgatgttcatcccwatggggtgttttaatctatatgtttaaaattttattgaatattgacaaattatacacgtatatatttatggggaacagagtgatgccatgatatatgtataccatgtgcaattattgaatcaagttaattaacaaatccatcacctcaagcacttatcatttattcctcctatctaactctatttcttgacttatggaattgagtaacttttagtaaattatttgctcagtgtttgaataccctaggtgactagcactgggccaaaagagaagatgaactccctatactttagtcctgttataagaactcaatttttataataataataataataataataataataataataaagaaggaggaagaggaggaggaggaggaaggggaggaggagaagaaggagagggagaaataaggaggaaaagactttccattttatatgcatctttatcaggagccaggcattgtactatgagctttatatctaattgaattcaagtttctccttagagaataggcttaaaaacagacttaaaaagttggatacatatgctgaatttaaataatgataacttcagtcagaagataatacttatgaaaaattagtgctttagaattatgatttgccaaattatagtagtacaatttattatgtaaacagaccaatttaatgtgatttgtcacaggattttaagtctagtcagaaatgacttgcacctactacaaaaagaaacatgtttatatttttaagtaaaagaattccattttctattaaaggatttggagaagtgacatcattctctactgttaatgctctgtgggtccatgcataacagtgaatcagaaagtgtacttgataatcagggaacattttgtcctctcttagtgacacttttgtaattcatgtgcccaaaggattacatattgtttattaatatattatatgtcatttcctcatttggccagtgctttgaaatggtaatctaatctaaaaaaaattttttgtgtggtctatgagaacatttttttcccactgagttctaaggcccagtgattcattattacctaataaagaggattctttattcatcttcatgcctcctttcccaagcatatccaattagagtcaccatgtgaaaattcataaatcaaaccgttcgtattttaatgtataaaaaaatgtacctaaaatactttaggtgatacatgctgctttctcattttttaaatttagcaggagattctagcagaccatgaagtgctgataactgttttaaattcagtatttattcaaatccaccatgcaggatagccacaggaactcttttatattggtaacattacataagtaccaatacaggacaaaaagatgaagcattaatacgtgcctattttacacattggtaacctattttgtcacttgactgtaatactttgtgcagtaaaattataaattatgtaacttaaaattgattacaattataattagtagttgtgcttaataatttttatattcttatttggttcaatgcctgatcttcaaacacgaacatttttaatctttttcaaaatcaatatatttgttcattagtaaatttagcaaatatttatttaatatttactctgtgcccagtacatctctcagaccgtggaatagttttgtataaaacaaaaacccctgtactcaagggggcttacattctggaggaaaggacagagaataaatagtaagaataataaataagtgatttatatgttaaaataagataaagttatggaggaaaaaagtagaacagagggaagaaggagggggaggaggaggcagaaaatgcagggagttgtgtctttcaattttaaatagtgtgctgtgttagtctgctcaggctgccatcacaaaatatcatagatggggtgtgttaaacaatagaagtttatttcctcacagtccagaaggctagaaatctaggatcaagtttcctgcccatttggtatcaggtgagggctctctttctggcttacagatggttgccttcttgcagtgttcttacatggcctttccttggtgcatggatggagatagagaaaatatggtggggggaggaggaggagaaaggagtgagtggcacacacacacacacacacacacagagagagagaaagagagagagagagatggagaacaagctctctgtgtctcttcttataagtcactaatcccatcagatcggggcctcaccctatggcctcatttaactgtaattcctttcttactccaaatacagccacactggggattagggcttcaacatattaatttgggggaaacacatgtattcagcccataatatatgatcattgagaaggtatttcagcaaacctttaaaggaagtgaagtggctacccagaaagatatacaaggcatacacacctttgcaggcagaggaagaagctgctgcaaaagccatgtgtcaacaatggccttgtgttattcatcaataaggaggctaatctggctccctaggagtgagcaagcaaggtggggactggaagggaaatcagaggggtaacaggggaccagacagttaatgagggaccagatcacacatgccactggaaggatatgggcttttctcagtgggagatgaggaggattttaagcagagaaataatgttttaaaaygattgtccttgcttgtatgttgaaaataggtggaacaaggacaaaggtggatacaggcagacttgctaagtttttaattcatgcaagacaggatggtggcctagatcagattatcagcagcaaaggtggagcaaagtgaatggaacatacataaaactagaaaaaatggtgtcatgaacccccaaatacctactaactcaatttaataataattaacatttggccacatttgttttatttagacattgttcacttatttctgaagtaaagtaagtcacataacgcatattccactcctaaatactttagtatgtttctctaataagtacatttttattatattgctgtgattaaacttaacaataaattattgatattatttaagctacttgtatatacgttttcaaatcagtctttgatttttttctttaaagttaatttatttgaatcaggatccaaataggaatttacacattatctttgattgttctgtttcttctattatttttttaaagagccttcttttctcctttccttcccccctatgtcatagactccctgaagcaatcagataggttgtcacgtaggaagtcccatattttggatctgtctggtggttttctcttgatgtcctttaattttttttctttccaccactttcttataaattagaaataagatctaaagctttgagtattcgcagtcaacatttttgtcagaagtactttataggtcttgctcactagatcaaaataccttccatcaggaagtgtagaatatctgattgttacacgtgatgctaaaattgatcagtaggcttggtggcagcaacagcatgatccttcattggaaagttggttttgaccacttataacaagcrtataatctatacagcgatattttgtcatcctgtaaatgtccaattccccattaactttcctcctaatcattttagaatacatttatgtttgttacctgaatcaactatttcgttagaaatactgattattaatttttttttattttgagctggtgttttgctcttgttacccaggctggagtgcagtggcacgatgtcggctcactgcaacctccaccttccgatttcaagctattctcctgcctcagcctaccgagtagctgggattacaggcgcctgccaccacgcccagctaatttttgtatttttagtagagacggggtttcaccatgttggccaggttgtctcgaactcctaaccttgggatctgcctgcctcggcttcccaaagtgctgggattataggcatgagccaccgtgcccagccctgtttattaatttctaattttgtcactcctttaacatttatgcagcaaaattatcttctaataatgagctttatctccttaactagggctatttttaaaaagtcataaaatgtagttcagataagaaacccagaaaagtatacatttcaattataaattaattaagaatatttaggccaaggagatggtctagttatagccagagtttacaaattagtactttttttaaactattgggtactgggcttgatacctggttgatgaaatcatctgtgcaaaaagctcctgtgacacaagtttatcttatataacaaacattcacatgtggcctccgaattgaagataaaagtttaaaaaaaaatcagtatttttgttatttgtatttcttttattaaataatcttattttttatttctgatcaatttccatttttattaaatataaggcttgaattcttccctctttggccagtaggagccccttcaggaggatcatttgttccttttataccagtagccttttgttagcttcctagatctctagcaccattatatgtcttgaatttgtttagttccttcctcccactttgcaattaccatctttccaaagttacatagtttctttggtgaaaattacaaatatgttgaagatagagcctacaggatttcctcacatgttttggatgtattctatgaaagagagtcaaagatgactccagggttttggccttagcaactacagtaatggagtgtccatcaactgagaggtgggaggatacagttgaaaggagggaagtgtacatgttcagttttggacatatcaatttaacattttaagtatacttcaaaataaagacgtctggtaggcagttagatatataagtctgaagtctggtggataaaaactaagtagtcatcatcatatagatgaaattaaaactgtgaggctagatgggctcacactgggagtgagtttagatagaaaaagcaagaagacccgggactgagccccaaagttaaaaaatctaggagaagaggaacaaacaagctgctacattttactagtattcttcagcaaagaatattttcttatgccaagataatattttttggtagtttgggattcaaaataagattccataataatatttaatgatcctgttatccctcttctccaggggaaggactttcagaaagaaccgtagagatcattctttccgtcactttgtgtatcctttcaataattctccttggaacagctatttttgcatttgcaaggtaagatttatttgcgcttacattccaggatgctttatgggcattatatcagtcatagtccaatcaggagacagaagccacaacagttacttgaatgggaaacatttttatttttaatagacagataaaaatgtatttatcatgtacaatatgatactttaaagtgtatatgcgttgtgtagtgactaaatctagccataaaaggaaagaaatcctgccatttgaacagaaaacatttaatgtaaagaattgttaactagcagaaatggctaactactaaagagagtaaaagagaaatctaagagtccagaagtagcaagcaaaacaaagcagctactctctttaacttgaaggagagaggacagtaaacaactaagaactgaaagaagttgtctcccaagacttacatggaatcgctacttctagcacatgcaacctatcaccaaacagtgagcaaagaaatatgacagagggaaggggttggagctgttccgtagaagctacccgtcattattagatggtaggcaggctgaaattggtaatagaagcatcccattcttgctgaatggtgtaggtgagctggtactacttgagactgttcacgaatggcatgggcagaacgttcacttcagaggcaacaagagctcatccaagtgagctgctgggctctcacaatgaataacaataatgcaggattggatcccacaagggcagtgttttcctcttcctactgcctctcagggtcactctagtgccctctattgacaaagcctcactttcggccggctggcaaaggagaaatgcaggttccagctccaatatcaaagagcacagcaaaaaaaaggaggtttggagatgagagacaacaaggtgaaaacacaaaagcagaagctttcaggccacctacatcttttaaagtaatttgtaactcttataggtttaatttaaaatatctcaatcaggtctaaatattaaagtttatacagaaagagatcttttttatagttagaacaacacttgtaaaatatccagcttccttatatggtagacccccttctcatgcttactttctgaacatgtctgtgctgaattttccaagtgtatctttccattctcagcatcagcatcctacttcccttattatttacagggcctcgttggaaatcttacttctgacctcaaaatctagcttcttaaggcagattgccgagttaaagggaccttacatttgtaaagtaaactttctaccaatttcctaaatagttcaatagactatttttatttcaactgaagaatgtagttctgtattctaaatgccatgcattatggttcatcttgactctcttaaagcataattttaatagataatttgaaaggctcttgaaaaagatattttctctataccacataactatttgcagatttagccagaagacagtgagagagttatcattcgaggcactttgaatgctataatgtgtaaaatatgggcctttccctaaggagtatggactggccacatttatgtaatttccctgctctaaaatcttttctgacttctcatttctctacaagatgaactccttgtgtgagtaggaaatggtcctccttattccccacaacttgcctactcactagctaaagagatctattctcacctgaacattccttgggcttttatacattctgcttttgttcagtcaccctgaaatgtgcttcctcctccttctcatcctgggacatccaagtcaaattctacttctttacctcctctaaataataataactatttatgtaactaatcaggcactgtcttatgtgttgtaatttgaatctttttttctcttttcatgttttttctgcattgaaatcttgcctctcaactaaattgtaatgtctttgagggtagggaacatgttttatactttccatatcatccttgatrtccaactcttaataaatactaaatatttgaaatgtgaaagatagaatagctaaacattactttgtaatataccatactgtgtcatggagaaataagcatttaaagggtttaagatgaaaagaatctgatttgattctcagattcatgtggcttttatttttgaacctaagttttctgattgtaaagataatatctactcacaatatttttataaaaattcaataagataatttgaaaataatttttaagtattttcatgcatgtaaaaatatttcatatatgtgaacacaatggggcattatctgttagcaatactattgatagcattgaactattttcactttggcatagttcctttatatgacaaatcaatgacatagctagagagaagagaaacaagatcacaacgtaagtcttcttggctctatatttaaatgtaccaatggctcaggccttcgtcaactaattcttcttaaatttagaacttcatcccaataacttattagaaaaaaaagaaagtagaataggttctatggaattaaaacaagaaaaagaagtcgagtagctataaatttgcaacatattcagagaggtgattttaacaaggaaattatttgactaaatgtctttacttaaaaagaaaactaaacctaattttatatactttgtgtgaaactcccttcttggactttactccgcttgttttagaattcgacagaagcagaaagaaggtggcacatactctcctcaggatgcagaaattattgacactaaattgaagctggatcagctcatcacagtggcagacctggaactgaaggaygagagattaacgcggtgagcacactcctctgggtgaactgtggtccagagggcctggagccatgaccctattctgacctatgcttgttggaagtgtttgtggggctctaatttacacaggtcacagagatcttctttcaaagagtgacctccgtcttctacacacttctcactgctgttcagagaatcacttaatcttcctaatattttgagttaaatatgaactttggactataatgttcaatcaggattattttcctgggacaaatatttttccacattaaacctttgacattatgtttaataattcatttcatatgatagatttttacattaaacttttctggaagtgtccacattttcaatcacaggtttaaattaattaaatttataactacttgatattatttatatccatttttataaaagctttttaataactatttcagtataaaagtacataaaagtctaagttgtatatgatatcatttttacatttctttgtatttaaaaattaaatataaagtaaaaagttaccttcagagggaaaagtaaraacatgtgtactaaatatgtttcattggtacctattggaaatagtaaagtacataattttaaagaaaaaataattataaatccttttaaaagcattatcaattattcaaaatgttggcacattataaaaacttgtctattaagataattcatcaaattcttaatgaaaactaccatcaggctattttaacgtttgcatttttataagattcaataacatgtaatgcttataagcacaaagtagttgttaccaagtatttgctcagctctgttaaaattaaaaaaattattattaattttgaaaatatggcatcaaatgtcttggactcaaaaagttattcatttgtagttgtcacttgttaaagttggtctttatctaatagatggactttgcaagtatatttccagcatatctaaaaatacctaatatgtgctatagagggaagtgtcatctgataagcaaagtccttccaaatgctacaaaatgaaggttattcaatgttatcactaaattgcagggaaatgtgttttcttggatatgacagctgactttttaaacattcagatgttgatctttgtgttctaatacagtggtcctatccacaaatggatagtactccaaagatttaagtgtcagatgattgtaagttatccaagacatagttttctatataagaaatattatgtacaaaatatcaaatatgtaaaaagaatcaataaaagattcccagggtaactcatctaagtaaaaccatatcataggaacacaagcactgctactactagactgtgtctcagcccttaaggaatcattctgcatcatcaaagaaagtttttcctccttttcccctatgggccaaatgaattttagtggtatcctcctagcctccttcctgcactccatcgtcagttccttttgcccctcctcaggcctgtgtggcccatccctttattctacaactgaaaatgcacaagggaaaaaattcaaatctctcaatgcaattaattttagctatttgaacaatatagttgaatctgttcatactaaaatgtaaacttctaagacygaccccctccccaacactggtaggcattttcattttgttaaaagaatacttagtagcccgtgaaaaatcctgaataagtatatcttcagcaaatgtaataacgtgaaaaagcactctttttgtttaytatgtcatgtttttaaacagtcaatattggagaaagtattatttatcgaagaggttacattcgaggcagactgtggtgagattcaatcccctaagcactatatattttcacagcttgcccctttctctacttctgaacactaaatacatcatcataaaaaaattagaaaaggtcgggtgtggtgactcatgcctgtaatcccagcactttgggaggctgtggagggtgaataacctgaggtcaggagtttgaaaccagcctggctagcatggtgaaaccccatctctattaaaaatttaaaattagcccagcatggtggcatgtgcctgtagtcccagctactccagcctgggtgacagagcgagactccatgtcaaacaaaaagagtagattttttttttttaagaatgactgtcatggcagctacagaaaagtttcagatcatgaaaaaggtgggcaaggaatgtayagattgtttactattggttatttataattcagggtctactttatttgaccttcactcttcattatttatttttccacttctgtgtttatttacatattgcattatttgtaaaaggktttaaaagtgaaataatatttcagataatttttattttgttacacacagagaattagtatatattacccatgataatagcaaaattggaaatattagtttccatgcttttcactttttcacttgtttgttgtgattctggtattcacaattgtttgtaattccaatggcacataataacatgctttgctggacttattacagaaatgcattaaaataacaattaagtgatttgggcattaattcttcagtacagagatctgtgtccagctttactatttatgcaatatttttatgttaataaagtcactaaaacattagacaataagactggaaaaaataacaaatataattagctgcatgtacatatgmgtggatcctgtcatttggtgaagctctaaaactcttcatctgttttgaggtgtttgaagatctaaatctgttcaaagtcaatcagagactgatggtagattctaggagtgagaatcaagaagtctgatttagctccctaaattgttggcagacttccaccatatgtctttgttatctgcaggaaagaacttccataatttctcttaaatctacccagctaataggctgggcatagtggctcatgcctgtaatctcagcactttgggaggcctaggtgggtggatcacctgaggtcaggattttgagaccagccggcccaacatggtgaaaccccatctctactaaaaatacaaaaattagccaggcatggtggcgcatgcctgtaatcccagctactcaggaggctgaggcaggagaatcacttgaacccaggaggctgaaagtggcagtgagccaagatcacaccattgcactccagcctgggcaacaagagtgaaactccgttaaaaaaaaaaaaaaaaaatctacccagctaacatacgctctctctacttgattcttaggcatgtcctttttattccaacctgctaaatttttcatgcaaaattgagctcataayttttctgagtcctgtatgttttcccatgtccaaaagataaatgataaaagaagaatctctaatcaataattaaaatattaattttaggaagttaccaactaggcaaaaataaaacaaaaaacaaacatggtgcttggtactaagtcctttcaatgatttgtggtttcatattttagaaattatttaactattttatactctctgcctgtatatttacactttaaaacccattctgtaatttttgttatttgtaaactcattatttaattatgctccactttgtttcacaaaacttttgaaaatgccttctctcactctatcattctatactatttcttcccaaatgagagcaggagtcaaataaagatgtagtactctttaattctatgaaaacattcaaggatatactaaaataacgttttaaattctcaatttgaatgataattatattatgtacaaagattattcacattttatgtttaagtttagataacacaaactataattcttaggaagaatatgtaacattttgggctcatctgtttcacacttaccgaattaggaaatgatccttgggttttgttatctaataaacatacagaacaacattttgtgatggctcctgcaaaacaccaccacttagcccactgaagttagaaaggtttcttagagctcttattggcaagatcagcagacacagacacgcacagtaagacacagacctgtatcactgagactgactcaccttgtggattgcctttaactactttaactgtamaacgattaccttcccatgagagtcacatcacttataattaaataacccaacagaattttcgtaagctaaaaatgctatttgctaaataagcttattttttactatcttctttccrcatttaagtcacggaagttttgtttcttatgccgactaaatcagaaaagaatagtaaaacaacattaatcaatgtcactaatattcttacttgacagaaactcagtttcttttagtcctcaattttttttcaaaaattttatgcaccacttcatattaattaccctgcctattttagttgagtgaatgtaatggcacattattttaagcctcaaagcccaatccaataatcacgaatagaattaaaattcacaagataaagtaaacaatctaatgagttggaaaaatttctattttaagagaagtcttcttcaataattttctttcttcagtaacttcagaagtgtacatgttgaatttttgttaaatacacagttatgtcttcaggaagattactgcttaaaaaaattctacatatgtactttgtaaactgtaaaccagaatacctttggtattgttactattgtgatttatatttgtaatattgaatactaccccggtctactttcatatatagagtttgctaacaaaataatagctactgtttatgagcaactcctgtgttaaactctgcatgtagtgatttcacttaactctttcaaaccttagtggtaggtacacctatccccattttacagatggattaaaaaatgatgataggacaggtttatgtaaatgtctaaggtcatacagctaataagcaggagagctacaagctagcccaggtctttctctgaggtatgaagatacacgtgtgtgtgtgtgtgtgtgtgtgtgtgtgtgtgtgtgtgtttaacttcgaagcatactagagaagattaatgtaaactttcttaartagacaaagacccatggaattcttcctcagcagcattttctatgatgagaatgagtctaaagaaagaggttcctctttggatttctttgttgtctcatgatatgaagcaaagaagtgatggcatttaatgttgactcaaacttgcaggaactggaaaacttttagtagtgtaatttttattttggcttcaataataactcataatttttgactgatatatgaaattctaatagttcacattttaagtgtcatcattctttgacaaattctgttcatatattttacttccgttctaaacttaagctatctttgcaaacaatggcaaaaatttgtgaattcggaatacaagaaatgttctatgcttagaatgaaattggagatacttaatgctcatattcttgtaataacaaatcaaaaataattcagtgtgtttgtatactaaataatgaatctttacttgcagatactcttcatttttctttagacgcaaggagatttttgtcatccagtaagttactgtggtaatgcagaactctgctgtgattattttaatcttgtcaggtggtgtgctctatattttaaaatayataatattgaacatcttgttgtttaatgcactattttttccaaagctccccccaaaagctatatttctatttacaacatgtcctttataatattgcatgctattgataatggtcaagttaatcttatcaaaatgcacattgactcataatgtgcatgtcctgagaatttgctgtgttctcatgttgtgttagatttgatagcaaattaagtttgcacctagattcctgtacaggcttctcattctgttatcaacatgacgcaagagttgagctctacatctgatgggtggaaactatatttacatttcatacaagctcatttttgcaactgtagatggttaacctgtaaggaccaagacaatgacatttcttgttccctgactctctagtgcatacacagaatggcatatttcatggaaacgttatttctccactgaccaatgggtagccaactgtgcacgcttccaggcactcccctgatgctcagaaatgccatttgtatcctggcacaaacattttttgttacattctgagagtagcatagcagaatatcagcactagcagggaccccagtaactgattgagygtcccaaacataataaatttcttcatgcaaagaatgtaaatgaaggaatatgaatggaggcagagaataaaaaggcatttgatttcaaaatcacacgccttactaaagaagaatccgtcttcatgagctataaggctgaatggggccaaagctcctgatagtctggttaaccatgaataatactctgcattattaaaatcaaggaagcccggtctatttctaatctaatcacatttagcatttgggaatcataagtaaccttgttttaacttcagattaactagttaccaagttcccattgacagaattaaaatactttaatgaaaatacatttccttcagaggacctgcttgatggggttcaaacatttgtcaaagtaagacactgttaaactgaagatttaattgatcacattacacataaaatatcaattttcaaccagcactcaaagttaacctctgggccattccagactcagaggcggtttggttgagcaactctgctgaatgtctttcttcatcatcataaaatagaatccttttcctattctttttctccttctctctttctctctctctcactctctctctctctctcttgctctctctctctcgctctctctctttctctccctccttccctctctctctattttctttctcttctttctcttttttcttctttctttcttttcttgcttgcttgcttctttcttttttcttgctttcctctctctaacgccaaattttctttcctagaatcagtgactagtaccctgctcaatcagagcccttaccctgacacagctaaacttaatcatttgtgttagtcagaacctttatagaacacctctacatacgtcatactatttaaagtagatctgtcttgttccaaatccagttttctgrggttgcttctaacatctaacagagaaatgttattgcctgcctgtcatcttggctaacaggcagtaaggccttatttttagctggtataatatcttctggtatctcctattcattgagtccttgctcagggccccatccatctcttcacataactttgatcagtctctttctcctctctatctacaaattctaccctgttgccccggatgtagctaaacaatgcccatggttttcatttagaatacatggttgacaaaagaagacttctggcaagaatatttyttcaaatgtgctaatgtggaaaggcttagtaataaggaaaattcaacttctgccacactggggatcatacctctgagctttttgacatcagcaagaatattgcattcacttctcatctaaaaggccatttcatcttgtttaaataaaaataaataacaattgagggccgggcgcggtggctcacgcctgtaatcccagcactttgggaggccgaggcgggcggatcacgaggtcaggagatcgagaccatcccggctaaaacggtgaaaccccgtctctactaaaaatacaaaaaattagccgggcgtagtggcgggcgcctgtagtcccagctactcgggaggctgaggcaggagaatggcgtgaacccgggaggcggagcttgcagtgagccgagatcccgccactgcactccagcctgggcgacagagcgagactccgtcttaaaaaaaaaaaaaaaaaaaaaaaaaaacaattgagtatctctcaagtgctaggcactgttttaggcactgggaatagtgtgatgagaaaggaagaaacattgcctccaaagagctatccttcaaatttaatgcttcttttaaactgatttgtcctacacatatgagaagatatgttgagaaggtaatacatatcatttactattaattgttttcctgatttaaaaaagtattacatggccaggcgcggtggctcatgcctgtaatcccagcactttgggaggtcgaggcgggtagatcccctgaggtcaggagttcgagaccagcctggccaacatggcaaaatcccgtctctactaaaagtacaaaaattakccaggcatagtggcagacacctgtaatcccagctactcaggaggctgaggcaggagaatcgcttgaacccaggaggcagaggttgcaatgagcygagtttgcaccattgcactccagcctgggcaacaatcgtgaaatcccatctcaaaaaaaaaaaaaaggaagtattctattactcacttatggtatatttctcttataaaattttagaatcagctgtataggaccaaccatgggttaggatattttaaatttatattgagcaccacggaaacatcaatgatttggtaaaagaatacagaaggatgtgacagaatgcagaaggatgtgaaagaatgcagaaggatgtgaaagaacaaaataaagaaaactaataggaaataacaaaaattaaggcacctttaaaagtattaaaatagatgctttggataagcgatagaatattgtagaagtagatgtaatttatgtgtcattagtgacttgatgaaatatataaactaaaaactcacactcagtatcatacaaaacttggaaatattaatattktaccagagaaatagattcttcacaaatttaatctaagtagcaagtacatgctatgggatacaaatacatatttttacaccaattgacaaatttgagattcttttatttttaacttaacatcactggttaagtagaagaaaagtttctcagtttgtcccataccactggtaatgctggttgaagctgctcagctataggttatcatctgtggctctctattaggactatattttaattccctatagatttcaactaattgaccttgagggaaagctgagtctctgtgacaatatggtcttcaatcaccactgccaacataaataaatgcttcctttctagatccatcaagagtaatctgagtggaatttaagtttttgataggctttaaagaaatgagtccagacgtgaaataagacacttttcaaccaaaagatatagaatttaagacagttaagattcgtgtaataaaaagtgtttagccctttctattggaaattagtcagttatcttattgaaatctggacagttcccaaattgatttatccagtaatgaactgattatagtctgacagtaaccttcactatcataaatgaatatcctaccagtctaaaaatgctttccatttaacagtttttttttaagtttttaaaatgttaataaaaagttttctatttgagtatgtttgagtatctccttggatcacttcattcgaaactagcactcctgaaatagcattgttgattttcatgcacatcaatttctgtgagtttctagtgcttatttaagcaaacagtttttcctattaggaatttaattatacctctcagtgataagttagtgcattttccttatagtatgtcccattttcttttctaattctctctataaatcagtcaaattaatttttttgtatataaacattaaagcttaaaacctcaaagaaaaatacaatttagaatgtagccaayacctaagggagaaatacacctatacaacatgaggctaagaaygaaagcaatgataagtatactacagacaacaatgaggaaggaaatatctaacttttatttgaratagtcaggtaatgtacctcaaaatgtcttctcaatttgagcattcctaatagrtatttgaagatttcaactcacaaatgattgtgacataagtacagactagaaaattacrtaaaaactggactactagaagctttcttatcttatataaacataaatgtgaagaacagattctaaaaagtgattggatttagataaaaaagagtgatacaaaagaaaataaagccaaatcagattccacctctctttttcttaaagtgtgtgcctatttgtttatcacttgagtaggcaagagcaattttattgttcatttatctaacttcctaacaaagtacacctgttaatttataacgttaggttatctgctatggcttttgcttagactcacatgctttttgttgataaatctattgattatacgtatttaaagctttgagttaggacctcttgagaattctcagtttcttaataatttagtgtgaaaatgtattcaattcagatattccctcacaataaagccagaatattcatattttgctttctgtgtatcttaatctgaattcatccacaattttatatttgatatgttttatttaatgtttactgtgaataatgttatgagggacatctagtaagccaagtgttaatcctgccccagccctgaagtatatatgagcccaaacacttgtatccttaatgcagggacttaaatagccataatacaacatagaagatgatttgtccttggaaatttgattttacaggcaaaggaaattattttctttttagtagaacagagtaagatcgatagggttgttaacatttgaatcaggtattaaagaataagtaaaatttccgttgtacgaagaatgcctggaatggtataaaattgagagggagggatatatagagaatatctggagtgcaaacaggatgcatgaagaggagttacaaggaataatgtcagaaatgtgggcatggttagaaatgttttacatgattatatgaaaactgaattattatggtcattgtattagagatttgtttgggatctcgaattgagagctagaaatccagacttggatttgaaagctagatattcgtgactactatattttagcacaatatagtctatccatctttgagtaaaattaagagaatattcttttggaaataatggaaaaaatcccttccttatatcagtatcaattgtagaacagtatggataggagcagcttgagatgaacaaactaaattagcaatagtaattatcatactattgatagtaaccaatacttatgtattgcttactaaaggcagagacctttaaatatatgaacttaatttaatacatttcccaaactaggaaactgaggcacagaaaaattaagtattkcacatgataatataactagtaattgttcaagcaggtatttgaaaccaataaaggcatcatattttctaataaggcaataattcacaaatatccacccaaacccattatagccagttatggtttaaaatatctttaggcggacatcatgaaatgcacatctttattatcccccttgaggggtgagggagctggggtatttatccaccaactctggttagtcattggttgatggatgtttcttggaatatttaccctccgatgcttctagcctggatgcaggagacactcgaggagagtggcaggtccttgtagtaggaaactatctccttgcatgcgaatgttgagtgcccaggcgatgtgggttaggcaccaatgacatctgcacaaacttttaaaaatctgaatttcacagcacttaataaatttacgatgatgtatttctgcgaaaaaaaaaatctttagggagagattttaaatgcaaaatgaattaagaatagtgaaacagcaacttttggtagagtttttcactgaaaagacatgaacttaaaacaaaaaaatgtatatttattcaattaatcataacttctgaaatgaagaatagagatgattaaagaagagcaataatatgaataatattttgctttagctatttcttgctcacttttctttaatatgattattcacatttaatgtctcttagggatttcacaaatgtatactgatgcttcaaatggtttattgacattttcccagaaaccaacatctactttagattctagttatctcagtaaaaatacttttgcagtaccggctcaaatgatcctctaggaaaaaggaatctctctgcgatgggtggcagtctcactgtccttatatakgtggactactagcctgtcactaaatcatatatattgtgcttaaattttgccaatcacaatggaataatatttgctgttattataaaagttatttccacaaagttcaagagtttctatgtccatgtggtagcagggaaatagaccttggtaatcaaagcatctcagtcatttatatcttaagttcagttgatcagaatttacccaacacaaccttctattctttcctatttctgaagaacaaggtatcataggrgcactgggcaacaagttatcttaagggagctaggtagtatgtgtggatgtagcctgtagtttatctttctttcttgctggtcttcgctgaggggtaattatttttaacaaagattgattgtggcttcagtccccactgcaactgttactatgtcagagatatttccagggcctccaatattcagacattctattttcccttccccaaatcaaagattcttctcatttggtagccctttcagccatctccatatccatctagaataaggaattctttcttgctttctttaaatcactctagggtattgtggggcactcttaagcttatccaccaagactctttgttagtcactgctactttgtcacttagatgccctgtttggcaatggaatagtctatcactttatgtttaccctgagaagctggaagatacaacatctctttctgcttggggggcacccatcattaactgagaattctaacattctactttgtaatacctgstccagcatccccatatttttcaacaattcctgtattgtaatgaaatatacttccttttaaatcctgttttcttcattgaatacacctctttttgaycattttcatatttattatgctctgtttttcaaaccattttttttcttttattcattctttgcttcaaaaaacatatcttcttacaaatattcttcaattaaagaatatagtaaaatccctaatattattctagatttaaaactttgaaaaagtcatatgttccttagttcatttcattatattttgtgccttttgtgttttttgcagtgctaatttgttgtgcatgacgtaagtgttattaatgatacgcccctctctaagtttgtgtatgttgtgtagcctatttagctgttaaaattatttttgtttacagagtataagtaatttggccaatgatctgtcacaaaagataggtctaaaataatggaaatagttataatttgttgttgctgtgtatttatccaaactcactcatgaaacaatacttaaccaatgtgatgtcatgtttcatggattcattctgtctggttcaacactttctatatatagaggaaatatttttaaaatccacattagctcttttagaccactaaataccatgcaatatattaaaaagtgatctatttttaatgtagtatcctaaatgcctaacatttttaagcatttataatgacatttataataacaacaacatcttttcagctcgagaaagaatgtaaattatttgccatgtttgagtccaaataatgtaatttcaaaaaaataaataaaatttaaaataatgatcatatattagttaaaggcatagcacattttacattattgatttattataattttctgactttaatctacacttctttcagaattagctgtccactctgactcacaatgcatttaacacaatctctattgcaggttacttagttatagaaaatccatcaagtaagtttgttaaatattttctttcttctttttgaatatcaaagttagatgcactgactcagtagaaccttaatgtgtgattcactttttgtatgtttgttggaaaaacctycaagctggatataaatcataaaagcatgactaattgcatggtaactggagaaatgctttctctctctctggggtgaagcctgcatgtctgtattttagcttgggaagtaatacggggatatttaaactccttggggtttgaaaaccatgtcattatgagaatgaggtcactgcaatattttatatcttctaaaaccttgtaatgtataaaatgttttctgtctgacaaagaggtattatgtgctttaggagtcaatgataacttcatgcccttacatttacttgaaaaattttcttcattaaaatgctaaatcctttatttaatgtcactaaaaaattgaaggaattttgtgccatgaatacaaagaaagtgagcttaaagaagaaaagttaattttataagtataacagagtgactttaaaaagctgtgttgtttgtgattttggggatgtccattgttctttaacttgttaaaagtgaagccagtgccaatgctaacgcgaacaaatacaatctaacatgaccctattttatacctttctttacytggaggccaataagcaagaaatccttcctgcaacatgttgaagagctttgcacaaacaacaacctaaagtttcaagaagaattttcggtatgttactagcagttgtcacaacattgcaagacctccagtcgtttcatgtgtcacatttcatgtccattttaagcaagcaaggccatgaaggactctggccttgataatcaatacccaattaccaggttgattgttttgatagtaatgttacactgggccrcctctggtgcaacctgatcagaattattcacctactgtgtcaggaaaaggtggtcttcttcagacctcccctgtattggcagcatgaccttgtctattctctgctctttcatccagatgtaggtgcaaatgtagaatgccatattcattagtttgttttgtattcaaggtttaggtcatactataagtgtagttttatatttaagtaattattttacatttggacactaaattatttcattttacgtttacctacttggtttacattagtgatatagatgaatgtgagatcaaaacttgaagcttccagaaactataagaaaattatttctagaactgtctaaaaataaaaaaaaagataagtaatgtccacgttttacagggggcctttttaaagttactatggaataaatgctgtatcatataatgaaaatgtataaaattaagaatttgtcactttaaatctacttaaaagttgggaatagttttttttttaacattttgtatatctataaaattgaaattatttaaaaacataaggtagatatcaaatcttcaagctactttaagagttataagcatcttttctaacttagatgattattttgttattaagaaagacagatttctacatgtcaccaaaaacattatttctattttatttttttccatgaaatttccagtgtgtgaactcctgaaacaaagaataaaacaattggrttaaataattcagaattataatatttcagtctcttagggaataataacaaaaatgagagaagattaatggtatttcctgcagccttttggttatgcttcttaagaaatattggtctggacttaacaaaatcaatagtgccataaaattcttcctagcatttagacagcaagaattctcaatttttcaggagcaaaagtgtaatttccctagaataagagtgaatgtaattacattatgcatgaccaagtagataaaaagttttattagcaataacattttcacatatatgagaaagtttctagtttaagttttttgaagaccatagtttgaagaactttttaaaaatttcattttgtctaatgctttgttaagaatttctaaagcaaattattaaattatgttttaataaatacatttttggtgcatatatttgataaaccttttaactcaggacatattcactcatatcttaaatatttataagttcctactatgtgataggcattgtatttggcacatacaatcagcacttaccagctaagtgactttgggcaaatttcttaaactctctttgcctcaatatcttcatttgtaaaattataatatctactttattaaattatgaatataaaatgattgaatataagcaatactaagaacagtagctggcacaagtattagctattacgatgataaattctaccataaagaagctcatattatggtaagaactgcagatgtgtaaaaattgcaaatttactgtatcttgatggagatatgcatgaagattgaggatcaaatctgtttgtatatcaaccagaaaagagtttataaaaaaggtgtctttcaggatgaactttaggatgagcagaagtctaatgagaaggtaaaggaaaaaaggtgttccagagacaggaaaaggataggaatgcaaaaacggtctaactcatctgtggtcccactgaaaagagagaaagcaataggagaaagagctaaatagggagaattgtggccttgtgcaccctgataaggataacactgcccagtgtaacattaccatctaaacaatcaacctagtgtttgagcattgcttaccaaagccagagctgcttaagtctagaaatggaaacttttatgtgaaataattataaaatataagtgctctttcagtctatttaaactcaccttttttctcccttctttatgtatttccaaaactttgacacaaggaagctgttctaggactccttattgggttaaaaaaattttgtaagcctttggtgccaacacatcagaattcagatcttacaccattcctgtcccttaatacatacccatatgtaaacaattgtccagattttaattttgagaaaaaaaaataagaaagggaaacttatccaattaaaagaaataatttatattgatgttgaaaaattgttaaaacacatatttttagtgctttttatggaatttggcaagttgagatttctaaaatggaaaactataaatttcacacatgtaaattttcagctcaacaaaataatgaacatattttcttatgccagactttttaatgatgcttgctttgccaagagcaaggtagatagataatatcataaattttcatcaaatgtcaataatagatcttcttgacccttcatctatatctgataattcttaattgcacctttgcattccattattgatttagcaatgcttattaagagcaggaattgacctctggcatcttctcaaactgaccaatgttgtaccaattaataggcatgaaatcacactgcctgaggagagaaaacaaaaaataaatcattgaaatcccttttcctactaagtagacattaaaatattaaacaatagtgtgtacctgatgaaaccattagtaacatatgtaaaatggtcactaacatggttgccacatcttaaggcttcccaaagtgcaaagaaattatctccgaaagagcaaaacccagctgaccaactttattcaggatatttttggtgaaagcctaggtaaactcattactgttaacttgaccttgtttccacagttatgataggtgtttttaatttaaaaattaaaaaaaaagtttaggacaaataactgtcttttaataagtgaaatttcttgtttacctctgataaatgtaaactttgtaatgactttattttacaggaattaccaaaatttcttcaggatctttcttcaactgatgctgatctgccttggaatagagcaaaaaaccgcttcccaaacataaaaccatgtatgtgcatttgttggttttggtttagctaggaaatatttttaaatgcctaccatcttaacttttttgtttccttaatatattttattttatattgtttgaattataataatgtattttattggcagtgactaccaaattatatatcttttgctttgttcatatttaactaaagttagtatacgtggttttcagtttgttcacacaagttcacttatgcaggtgcaagaaactgyagacctaatagtttcttagctttgtaattaaacccaagtaatgaacctgtttaacatcttcctacagacctagcatcaaatgcaaagggaatattctcacttagctttgtgcattagtttcccttcacagcatagcagtgttttcctatggaacataaaaaaaatgcattgtaaaatattcattgaagaccagagtaaatgcgcacttacatgaattcattttacatatgaggcagaatgagcttcaccatagtacatacagcttcatttttcaatcaataagaaaataaacagtgttattgcttaaagaattaacagtgatgtgaaaggaaaataggacatttctctgttactaataactatatgtttgctattatatttttgaacagatatccctattttcaatattctgattcaatacattttacactatgaaattaaaaagtgacattgtgatgtcctgaaacgtttcaaagtctagagttttgaaatgttcccaattttaaagataatatacatctgtgtgtgtatatatatatttttgtctatgctttttcaaatgtatattgggggaatagctacacttcttaaaaattgaattcttctttctagaaagacgtagacctagagaaggatgtgatcatagaatgtcgaattgtaaaggacatgcataggaagaaacagaccaaattctgatattctagaactagggaataacttatgaagttcacgaaggaaacaaatgtaaggaaacatgatataggaagtagtaatctactagaacctgttaatttctaagaagtagaataggatgaaaatacaaatagctttaaccacctaaatcctttctgcaacaaaacaaatcataagtaaatgattttaagagcaagataacaagactcagtcagaggaaataaacattcataatttctttttctttctttctttttttctttctttcttttttttctttctttcttttctttctttctctctttcttatctctcttcctttcttttcttttctcttttcttttctttctttttggacttttgatcttgttgtccaggctggagtgcggtagtgcaaccttggctcactgcaacttctgcctcctgggttcaagcaatctcctgcctcagcctcccaagtagctgggattacaggcatgtgccgccatgcccagctaattttgtattttaagtggagatggtttttcaccatgtttgtcaggctggttaaatttctaagaccaggacatttttcaacgcatccttttattctttcttttagagagttaacctaggttggatgcaatgtaagtataaaagttatggacattcccatgtctttatatttatctgcacctaaatttcatccagactgtttgcttcatgcttatttggtgatattctgtgaaaataaatactgtaatctgattaagggacagtaactgtggaataattagtattttttcaattgtatagaattaatggcckggcgcggtggctcacgcctgtaatcccagcacgttgggaggctgaggygggcagatcacttgaggtcagaagttcaagactagcctggcaaatgtggtgaaaccccatctgtactaaaaatmcaaaaaaaaaaaaaaaaattagccgggcgtgatggcaggtgcctgtaatcccagctactcgagaggctgaggcaggagacttgcttgaacctgggaggcagaggttgcagtgagccgagatcgcaccattgcaytccatcctgggtgacagagcgagactctatctcaaaaaataataataataattaatttataatatatcagtatatataaagtaagtaattcaaatatgtctaacttacttccaaggagtgtctaatttgaaatatgtaaaatttgatagatcagaaagtttttttgctgtgtgacttttcaatcatttattaagatttcagtgcattattatctgggttccctttaagactgtaagaaatgttagacaattttagcttattacttataggatgagaagagaataagagtggttgatgggactaaataaacaatcttaaagtaataaaaaggaccgaggagtatgactaccccaattttccatatctgaagctgagataaaaaattaatcaggtttcctgggttacatatctgtttacccactaactacattagtgactctggacattttattcagtggtctctaccccataagagtattgtaaaaattagatgaaataatcatgtaaatcgctttgcccagtattggaacacaggaaacattcaaaatattagttcttatcttattggttaatagatcatttccttttaagagctgctaactttctgggtgaataaggttaattcataggcatttaggctatgtctggagataacaaacccaaatctctagcctgggttagaaaccaagccgtaaagtcacaggcacatctattctatgggcaagtatacccccggttctctctgtctctctctctctctctctgtctctctctctctcacacacacacacccatacacactctcacacacatgtacacacacacactaggaacaagcaaataagatgtttaaactaagtagattatcctattgtgcttgcagagaacccataaagctgaagaaaatttattttccctgcagagattgatttcattttaatagaatttgaattttagctaatagaatttgaattttagcttgagccagctaaatgaagtccattgtttctctcccctgagtaatgtaagaagcagaatgccaaatatcacagcatgttttagaagacattagcttaaaacactttaagatgctagaattagcagcaaatacttgcagaagagatttccaaatctccgtttgacagacgacctatgaccttcagaaatattccaacaccacaaagaaaagtttagcttgtagttgactcagatagttataaggaggtgtatctagtgaatagaaacataatgattctcttccttagtaacaggactagttacaatgtcattaaactagatcatataaaattctatatttgggacataaatcatttgcagaaatgtgtttaatcattcccatttctaaacataaccacattgggcaagtaattgtgattactaacaatacaactaattcattttaacatattatgtgcttaagttttaagaatgtaagaacatgtattgagtgcctattataagctttcatgtaaattttcttcaagaggattatacaaaatctgtgttataatgacatcttgtagctgaggtaaccaaggagcagagaagcttagcaatttacccaagcccatatgtatggtaggcagatcatctagaattcagacccaatcctgtttacccatttttcctccttgaaaacaaacaacccatcaaaacaattaagtagtggatatttcatgtttagttaaaaatyattactggatgtttcaattataatatcaacttggtaaaatttctcaggaaaaatagtttctgacatttttctctgaagaaaagtaatgagtacagggtatctarttttactagctcttaaaatattctaaaaagtagtaattagaaatttgaaagaaagaataggcagatgaattaatggaaaagaatgaatggtctagaaatagacctaactacctagaaaacaaagtggtgttccaaatcagggacaaaagatgaaatgttaaaaaattgatactatttgttgttccaacgacaacagataaacaataaaagatatatttatacctcattcctcaaaaaaaaaaaaaaaagtcccaatgggacaaagattgaaatacttaaaaccagaaaaatccatgaaattttcagaagaaacagaatttgtaaaataataataatttataatgacaactttgacaaatggtacaaagtcatagtgaaaaataatgagaaatttgattgcataacaatataaatttttgtayggcaaaattgatagacaaattcatggacaaatgacaaactaagaagaaaattttaattaatatgacaaaaggcgatatgtagccttctgtttttaacatactttttttaaataaaagtgagaaaatgtgaaaggcagttaataggaaaggcattaaaatggtcagtaaacataaggaaagaagctcagtttcacttgtatttaaggaaatcaaaataaatattatgagacatcaatttgtatttgtacaaagaacataaagtgtttaataataccttgtgataatgaaagtaagagaaaacagaatttttcaaacactttggttcagagtatgaattgttagagaacaattgagaaatgtttttcaaaatttggaatgcakatatataaaatctaaaaattttactgctggtagtatattctacaagtacactcctatatatatgcaatatgcaaaaatttcaattatatctattcaacattttataattacaaagtgaatcatttaaataataataaaaggttaaataactacattattatatattcaaacagtgaaatactgtatagcttttaaaaataattaactacatatctttgtttatgctgatacggaaagacataggtaaatgaaaaaaacgatttgcagaacagattgtatatcactccatttgtagctaaagaaaattagaatataaagaatatgtatagaaaattctggaaatatatacaaggacatattaatagtcattgtctctgggtggtagaaatatgggagaagaaataactttttaaaatttaccgccatctgtgaaattggaatgttatattatgaactcctttgtattacttttatagtaaaaaaagtagtaacaatttaaaaagccaattaacattgattccttatattttcttctagataataataacagagtaaagctgatagctgacgctagtgttccaggttcggattatattaatgccagctatatttctgtaagttactattttatatattttataattgtataaaacataattactgaaattgtattatctttccaattacttaaaacaacaaatttattacaactcctatggatcttaatatgctagttatttacarccacattgtgtaccctyattttatagatgtggatatggatatgcctaacagagatactaacttatcaaaaattatttcaccagtgcgcggcagatgttcaacttcaggctacacatccctgatctttccactaattcatatgctttgttaatgtattctccatatgcaatgaagtttgccaatctctgtgaattaaaaattatcaaatggacagttatgtccatataacatgaaaatttattatgcagctcttcccttctagatctgcagtccttcaagcgggtaataatgccatcaccatcataggtacattgaaaccttatatgcactcaagatctccacttggtttgcaaattcatggaatcttaaagaaggaagtgccytgaatttgaccattcaccttgaaactctaaaaaattcctgtcagcctcttttggcattgattcatccacttcttcctaagacgggattctatctctaaacaactctgctttacagttgttgggtttttttttaaccaagttatgtctctttatattcttacccactgacttaaattctaatgcatagcaagcttaaccatcttcattatggtgaatctacaaatacatgaagatttcctctgctgcccacactctccataggctttttcttatccataggtcttctcatccatgccctctatttccttcagttctattaaggctcttgttatatgacgttccaccctttctccaacrtcaaacatacttgtgctgtgtctcattccctccaagcctttgtcatggaggaaaaaaacgaattagttctaaatctgatattggttgataactaatctaaaattacaatcatatattgggtcctgttgtcaaaggagtgaataatgggagaatttaagactttaagactttttaaccagagaagtgaaggaaagtttagagaagctaaggtattctttaaatttcattctattttaatgctagaactttaaatctgtatttaaagaattacatgaatttactattatggtaacattttattcatttatcaaatgattgattccctctaaaatgtaattcaaaatgtaaacattttggtgaaatcttatgcttacaatttccattaaaatctaaactctacagcatgttaaagttttactyggatttacaaaatgatgcatatatgcatttagatatttacatttcatcactactctgataatcaaatgccatcaagcaggacaaggacaactggttgtatcagtgacctattgatttgtatcattttttattcaccaataagtagatacaaatcaacagctcatattgtctaatgttccataaggcatgacagtacaggatatgaatataattaagaagaaaaacagacaattttagtaggtgtagctgaaccacacagattatgtaagcaaagtaattttcgcaaacccccagtgtccccttgaaatatggtaggttgtcagcatacaactatgagcaaatgataacgtggtatgagcaataaactaggaagcctgaagatatatattctgctgtaatcaagtgatgttgtaatataataaatcttacaacaacgtcactatgacccaatgtaatgatatgcataatcattgctgagctgcatggtaagcaggctcagatggaaggcactttacaagaaggcggatttctatattggggctggcagtgtactgtagcactcagagaaatctcctttgctcaggatgtcaagaacagatgggaacagatgtagcaatgatactgcagtggccctcactttccacctacgtattcctacaatcttcaccttagaaagaatgtctggtatatcaatttccscctacccccaaattttattcgaaagcacttccaattgaaagtttatgaacacttgtcccaggagcaaaagacagaggtcatctatgaatggattccgggtttcaatttctttggaagctatggcaaagggaagagaactatagagggaggtmggaaagaaagcaaaataactagtgttcagatagaaacatgaaaaactgaagtctggggaagagacagaggaggaccagcatatggtctgagggatgtatgttaagactgggaccctccagcccagggtttataactaggttaacatgccaatgtgtgttttcctctgccgttggccattctcgagaatggtgctcccagagttaggacttggaaaggctggaagattttgatgaaggatagactgtgaaagaggtaggaagaagtgatattgcagccccataatctgccaccaactgtacaaatgagtttagaaaggttttcaagagrgtcaaaaatgaaaatactgtgattttaggtataagaggaaggcttataattaattttgaggaaggctcgtcaaaattatctctcctgtcaatttcagatgcctgcaattactttaatttgatgacagcttttaacacaactagagattaaaggctatcatgcaaatggttgcagtaacattagaaacatcagatttgttcctatgttgacagagcattataatactaaaggatattgtgtccctgaaaaagtgaaatgaaaatgacaagagatacattttataaatcaaaatcaatttattaatattgatcgtcctctcttctttgatccctccamactttgtatatttagcatagcctttgtcagattctaactcacagtgatctcatttattaaytgccttctctgtgtgaggaagagcataaggtactgggcactacatgaggataagcatgtatatttcctcttatcttagtaccacgtaaggatggagattcagtcttcatgatcttactatcaatccttcaatatgaattgaggacccctaaaacacatacatatgaaaacacaaacacacatgcatgtttatatacatcatttacaaggatttgctagacagtttgggggatattaagatgaagaatctctgcttttaatgacatcataatcatacaaaaggaaaaaawatatatatataaacacatatatgtgkgtatacataaatatatttgtatatgtgtatatacagttatattttatatgtctatattttatatatgtatatatataatataaacatatatacattttgtatgtatgtatctagatatgtatatgcatgtatataaattctcccactattcactcctttagcaataggacccaatatatatattgtaattttggaataattatcaaacaatatagaatatggtgatatatttttatatgccgatatgtatacatttgtatataaacatatacatatatgtgtatatgtacacacatatatgtacacatacacacatatacttataggcatatacaaatatatcaccatcaatgcccaacacattttctttagcataataaagcaattgagggtgtttgcaggagtaaatataaactgcacattttacattttttttccctagagcttatatgggtaaataaagaaaacctgttcaaggacattgataggcactaaaatgtcattatttcctgtataatatggataaactttaacataaaaaaatctgcaatttttggaaacctttacatttatagagcacttcaaaattttcaaagcaatttcacattccttattttacaaatagtattcaaaatgactctctgaggtgtgcaagaaaataatgattatctctaatttataattaggaaactgaagattagcttatttaagtagcctgctctacagggtacactattagaaaggactaaagtcaaaaccagtgttctagtctctaggcctatacattgttttcattattcaaacttactgccttcttctatacaaatttaatgaaataccttatcttcactaaacttaatgctagaattattgagaaagtatgcagataattaggtttgcaccattcaacattcacaatagttaaatctcaaaggatgaaaagaaggattggtctgaccttctccatctcatatgctattctaaaactaattgtatctgcatatacaaattcactggatataactgaataactgctgtatgagattagaataaagcataaaaatattgatttggaagcaatatttaaattacttttttagcatgtagttccacaatacctgagatgtagtaggcatttaataattgagttcataaaaaggaggattatatttagatgggtaaatacatatgcttcagagttcaaatggacctgagttcaaattccttctctgcatttttgtagctgtatgacctgaaactttctgagtgaagtttctacactgataaagtaggaataataatcaaccctactttattcattgctgctaaatcatatttcaattattcactgaattacacattggaagcatttaataaatacatgttatttttattgctgttgatgtttcatggtagtagattctacattttcctggctgataatccagaggaaaatctctgagctaatttaaggactgcaatgaaaagtggcatccatgggtaaaggtcataatgaaagttgacctgtggaatgaaacttacactttgttccatgtatcacagagctttaaaaaccagtaaactctatattccaattaaagggcaaaagtccaggcaagaagtttcctctcagaaaaactcaaaagtttgcacacacatattcaaaggtagaagcagaaatagcaaacagaattgacatactttcttcattttcataagatacaatggaaatatctccaaaacamctttgggcaaacattttacctggtgctttaccattttctgaaataaattagccattacaggaagaaaacttaaatgtgtcttagcttctttacatgagaatcaaggggggaaatgtgaccatataaagatatatttaaataacagataatacatagatatatgtattaaaaagaaatataaaataatatttcaaatcctggaaaactgagatcatataatgttagttttgtaaataagttgtaacaagattgtataggaataatcccaattatttatatatgtgtatgtatataaaatatacagtataatatttagtatacaatatgtgatatattgtctatattactctgtgtggaacctactcctcccttacaggtactggctttctggccttgctcaccagtgggtctgcataccctcccgtacgtactcagcatagagaagggtcaagttgcctcaatcctcagtgccacctccacatcattctctatccctctgccctaaaattgccagcttgaattcatgctatcaagcataggacacaccattgctctttttggaagttaattaccatcccctaagtcactttctcttgtttcttaaagatttcactccrggatcactgcttctctctcatcactcttctgtcataattattgatgatgtcaaaattcatataaaatattgacccatagccctgctcatcactttctggacctcttctcttgcagtgacttgccttccacatgacctcatcactttctgccatgttcacaacctagaccttttcaccaccaagaattgtagcctctccataatcttgattgcagatgtctcactatctgtccaaatccttctttccagatcactggactctgataattcttcaaccctgctctgccctacagctctttgattctatcgaattttccatttctcctaacccaatcaagacttcattttttctcttgctcagcttgaactgcatgcctatttgtttcctttcctctattgtatatatcctcaactctcaaatttatctcttatagtctcgaccttttgataaatccccaaactttgctaaataaaaccctccatggattcttctctgtgttactagaagtgtattggagaaaaattcatgatcacgccaaaatatctcactttaaactcatggccactaacctcaaaaacacagcctcctaatctattcaatctccctttcttctaggagattctttctccttcttctttcttctctggcctctaacactatattcctcattttcacctacatctgatagccttgtttatatttcactgataaaacaaaagcaattaaaagagaacattcacaaggtcccctacttgtctgcatctgtgtccatatactcagtctttctcctgtggctgcatatgaactgtcctagtccctgataacagccaaccctytcacttggacactacatgacctctccctttgcctctcaagaacatgggttgaggaattctcccttctgcatcatcattttttctcttttagcagctaaacaaatctattgtaatttcttacatcataaaaatatcttgatattataggtttctctctacttctttattgttctttttatttacattatagccccttgaagaattgtcaacacttactatcttcaattcccttctcttatttcttcagcaccctcaaataagacttggatactaagcaagcacaacactgaatcagctattttcaaggtcatcaattaactactcagaaaattagccttaagtctcagtctccaatttatttgacttttcagcagctctgactctttcatcttagtctcataggttctatctcatcttcyagacctgcaaacaaaataatttagagctcagtacttgaatttactatctctttctaaactctttttcttggtgattgtaagagtcagggttctctagagggacagaactaacaggatagatgtatatatgaaggggcgtttattaaggagtgttgactcacacaatcacaaggtgaagccccaaaataggccatctgcaagctgaggagcaaggaagccagtctaagtcccaaaatctcaaaagtagggaagctgatagtgcagccttcagtctatgaccaaagggccatggcaaattactggtgcaagtcccagagtccaaaagctgaagtacgtggagtccgatgttctagggcaggaagcatccagcatttcccagtccactgactcaaatgttaatctcctttggcaataccctcacagacacacccagaaacaatactttgtgttcttcaatccaatcaagatgacactcaatattgaccatcgcagtgatgtcatccaattttcatgactttaagtaagagatatgagctgattactttcaaatttatgtctctagtttggacttcttactgaattctaaagtcatatatctaattgccttcgtggcattcctacctgaatatctaatagtgatttcaaacataatatgtccaatgtgagttttttattttccctgcaaatctgttcatactaaaacctcaaaaacacaggcagtaaaagcaaaaatatacaaatgggattatatcaaagtaaaaatcatatgcacacaaaggaaacaatcaacagaatgaatagacaatctgcaaaatgggagaaaatatttgcaaactattcatccaacaagggattaatatccaaaatataccaggaactcaactcaatagcagaaaaaaaatccaatttaaaaatgggcaaatgagctgaatgaacatctctcaaaagaagacatacaaatggccaacaggcatatgaaagattgctcaacatcactaatcatcaaggaaatacaaatcaaaaccacaatgaaacaccatctctccccatttagaatggttattatcaaaaagacaaaaaaataacaaatgccagcaagaatgcagagaaagtggaattattatacactattatacactatttagttttcctcagaaaactaaaatacaaccatcattatgacccagcaataccactactgggtatatatccaaagggaagaaaatcagtatgtcaaaggcatatctatgcttacgcagtaagtgctgcagcactattcacaatagatgagataaagaatcagcctaagtattcatcaacagatgaatgaataaagaaaatatgctgtatatacgcaatggaatactatttagccatgtaaaagaataaagtcctgtcatttgtggcaatatggatgagcttggagaacattatgataattgaaataatccaggaacagaaaaataaataccacatgttctcacttatgcagaggctgaaaaagttgatctcgtgaaagtagagagtagaatagtggttaaaagctgggaaggggaagaggtgagagtaagagattggttaacgaatgcaaaattacagctagataggagaaataaatactggtgtctatagctctgtagtgtgactataacaaaccacaatttattgtatattttcaaatagctagaagagcagaatttgatgttcccaacataaagaaatkataaatgtttaaggagatggatgtgctcattaccctgacttgagtattacacattgcatacatgtatgaaaattktcacactgtattccataaaaatgtgcaattattatgtgtcaaaataataagaaaagattattaaaaactgctcatctggagtcttccccatcttcctttggagtcgttattgatttctctgtttctctcatacctcatatcaaatctattagcaaattcagttggttttgccttcaaaatgtatccatatctgatcacttctcaccatctccattgatatcacccatgccaccaatatttcttggctgaattgttacaataaccctctaactattctccctcctttcaccttttaaactcccataggttggtctatggaagcccacgtgaaactgttaaaccacacactatgtttgaaacctttcagtgactttctgtgtcattcagagtaaaaagcaaagtcttataattactttttaggacctaaagcaccacttatactccctgctttttctagccattatctgttactcttccccctcatttactctactccaggcacctgctgttcctagaacattcctgacacccttctcctttaaggtcgttggacttgattttccttctacccacaattcttttcccccgaatcctgcaggcctcacttctttccttcttcaaaactgtcttcacattatcaccagtgatatgtgaagtttggagatgggctggagaacactatgataagtgaaataagccaggaacagaaaaataaataccgcatattctcatgaagtatttattttttctgaataacctatttctgaacagcctattttctgaaaagcctattttctgaaaactttctctcatagcccttatcacttttataaattctatgtaatttgcatacataatatacattaatagacaatgtctatttctcctaatgataaaataaacgagggtaggaatttcagtgtctttggtcagtgatgaacccccagctcctaaaatagtgcctggaatgtaatagtcactcacaaatattgattcagtggagaatgtgcatatttaaaaaatctgtaaagaaatcaaccaaaatgttaatggtccttcactctggatagtgggattacaggtgaattctactttctattatgtatttttctaaattttcaaaatattctacattaacatatattatttttaataagaaaagatccctcacactttaactacatatttagrtctttyggttgagactggaaagacagaaaagctgcagtatactgtgtatttaagagaatcaagattttctacaagcaaatgttcctggcttgcactgtaatttgggaaaakcacctaaagtgcctcctcattgttccttaaagtaaaataaacttgctggattacattttagagtccctggaaaatttaaatatatgttattttttgtatattactattctctgactactgagacaatttcaatgtaaaaaagtaaatgttaccttttattccatattccttaaagcatcttcctgtttgaaatagatgtcattccattactactttttaacttatacattacctttctttaaaagaaatccacagatactgttcacaattatataaactcaagtgtcatgcttttatgttccaggtaaatagaccaaatttcagagaaatttgataaatatacacaaggatgtcataatagatttaagacagatctcatgtcctatgmgtttactgtattagcaaaatgaaacttcatattaccatgtttttcttgggtcagaactccagacagtaaatgccactagactaatgactaatgccacagtttaagtagataagtaatttcttagaggaagagtgtacatatatctgcacaaccaataaatacatggcagaaacatcatggagtgggtttagagagctggttctgggctcaacctgccttaccaattttgagatcttggcaagttacttcacctttctaagcttcaatatcttcatctataaaatgagcataatattagtactaattcacaatgattttataagaatattgartataagatgcttagcaaactgctacaaagactcagacttaagacctttattaagttstgttattattgtaaatattattatgtagtccttaatgttttattcaaaagttagacataaattttgagaaccatttgttgtgtagtatatcagattgtgaggataaatttagacgttggaaattttgagtatttaagattatctagtatttacggtattctaaaatattaggtaattttacaaccagcatatgtttcatgcattgwtcgaaaactaaaacactgtatctgtgaacacagtgatgcagtgtttgtaattatatccttctagggttatttatgtccaaatgaatttattgctactcaaggtccactaccaggaacagttggagatttttggaraatggtgtgggaaaccagagcaaaaacattagtaatgctaacacagtgttttgaaaaaggacgggtaagttatttgaaaatgttttacaaatgttgttttaygattgtgttaacatatgtgtgaatatttcatctaatactgtgagtcatcaataacctgkacatctataaagtaattttaacttagtcgtaataactgtggtatacatatatatcaatataacaatgacgcttatgactgatgattttctctgaatgcagatcagatgccatcagtattggccagaggacaacaagccagttactgtctttggagatatagtgattacaaagctaatggaggatgttcaaatagattggactatcagggatctgaaaattgaaagggtaaaaaaaaaagggggggaygagagaacatgatataaaatatgattgatctaaatgtctaaaataaaattaatttctagaactatccctttcaaggatacctrtatattcaacaatgcttttgtattgtcttctgaacagaattttgaatcgatatccaactttagtatcaatgtcactgtatttgttccagatcactctagttaaagtctgtattaaccaattagcatcacattcttaggttgacaagagcagaaaaaggagagaaaatgatgagatcactagctttattttatctaatgaagaaactgtaatatctgacttgagacagcaatttcccaagtcactcatctcctgaatcctaataatttgattttctatttaatctgcagccagatagaaaaggtagtatgggatctcactttatgagatctttatgggatcactttatgggatctcagtttatataaatgcctatacacacagaagatgatataaggatctttatacttttcacataacagatgctcaatacctgtgtatggaataatttgtgaatgtgttcatttaagttttgggtcaaaagtgtttcaatacctattattctgagtgctacaaaatggcatactatatttgaatattaatgtcctatattaacatttatttccaagctttcttatgttttcattcatattgaaaggcaattctctttattgtaacaataaaaatctctcttataggaaataatgaaaacattttatttggtttggtaaatagtcatttttaaaagatcaccttcaaaaactgggactattgccttcaaccttcattgtggaacttaaataattttgtcattcattaatccgtccctttgtctagcatggggattgcatgactgttcgacagtgtaactttactgcctggccagagcatggggttcctgagaacagcgcccctctaattcactttgtgaagttggttcgagcaagcagggcacatgacaccacacctatgattgttcactgcaggtgagaaagtgatcagaaatggcctttgaacccattggtctttttattattaaaattccattggttattttttataaaatgttcatgtaaatttcttccagcttgccgtcttcagagatttcacatttagcatttctagacacattggtatgatttatgttttctgacatgatagatctaaaccagtcttgactcgagtctttttcacagttgaagtttggagattagaggaaaatgtagtatgaattctacttaaatgagatactcagaataggtaaataaatagaaacagaaagtagagttgtggttattagtgaggagggagatgaaaaattattatctaatgggtacagaccttctatttgggatgatgaaaagttctggaaatatactgtgttgatatttgcacaacattgagaatatayttaatgccactgaattgtacatgtaaaatggtcaaaatggtagattctctgttattcatctttcaccacaataaaaagatttttttaaagtaacaataacttttaatatttttaacaggagtgtactataattaatgtggttaaatactgtacataagaaaagataaattcattcagtttttaaacttttattttaaaaaactcaatatgtaatttaaatgattatacattttccataaatttctggatttttaaaattataagactaatacgtaaatgcttgctcattataaaatatatgaacaatgcttatatttataaaacatgtagaacaaaaagtaaaagcctcatttttaccttctcaattttaaatccctccatataggtataaagcttaatataatagtatatactaaaaacagtataacaatttgcttctacagtcaatgattgattttatgctggcatcactgatgattaaaacctttgatggacagtagctgtcttcaatttctctgtatcatgcaaatacactgccatgggcactaaaagaaaagtactttctcctttttagcctcaaaaagaatagagtctcctcctttgtgatttaaataagagataagaagaaagtatgttcatattattgaccatctttaaatatcatttgaaaaccatctactaaatatttatctccaacttcaacttctcaccttgactttagacttctacatttagcttccaattcaacttgacagactgaatgactaaaaagttctagaaatttgatgtgtacaaaacagaacatttgactcaatctccaaattcacccctgctctgttgttcctatcttggtaaaaagcaagtttttctgtttgagccagaagccctggagtcatccttgattctgcttcctctcacattccacatctaacccaccagcaaatactttcatccctgactaccccacactcctcactgtactctcacctccctggtctcccctgatttttgaacattcaaaaatgctgccacctcaggtctgttctcattttgcttcttctggctaccatgatcttctcccagatacccacatggtgtgctccctaaccttatgctagtttcttttcaaatattacattatcagagaaattttgtctgctgaccctatcctaccctatcaccctctatctccttaacctgattcatctttttttcagtatgagacttcttactaccaggcacattcttggtctgtttatttatgtgtcgttttcctctggactataaactctgtaagtgcagggactttgcattgttcactgctatgatccaggtgcccagaacagtgtttgacactcaaaatatatttaacaattcaatggctgtgtggcatrtatatatatatacatgttactatactcagttttatgttataggctcacaatttcttaggtcaaatcataggaacttgccaatgtttgaatgtttcttactacagaactacaaaaatggcagtttcatgtggttcaaagtaatatttataagactagatgaactttcaaaaatttttttcgattaacttcctctattaaccatttaatttcctaggaatcttgtctttctgataataggaatttctgacaataggaatttccgaatcaatcttgtgaggtttatcagttaacagtttctatggagcatatacctgtctttgagtattgatgtaattttttaaatgaaaatagtttttcaattttattatctataggaggcaaaataaattctagagaaagaaagtgaaaaggacaattgcaacactatttttcaaaatgaaacaaagaaaatgctatataagctaaatattctacatttgtaacatttagcatttctgctggtaactgaatatttggtcaatacagagtctctggtattaagaattttcaatgattttaaaaaaatctctatacttcaacaacacaccctaaaatattaagaaataagaggttaagttccactgattaaagaaagacaaactcaaatatttgatagcatattaatgataatcatcttgccttgtttaaacacaatcttggtaaccataaaaaatccaaagacactccaaagaaaatctgcctccaaataagagaagaaactrttagaatttattgctatcatagctcattatctttatccccatcaaaatgaacaaccctttgctgaataattttcatgtaatttacccttcctgtagtgctggagttggaagaactggagtttttattgctctggaccatttaacacaacatataaatgaccatgattttgtggatatatatggactagtagctgaactgagaagtgaaagaatgtgcatggtgcagaatctggtaagatctctaaacctgcactgcattctaaagttctagaatttccacatgggagatcttagtggcagcaatctggatggacatgagcttgaagctgtggacaccttcttttcctacattataagccttttggggaggattcgggagggcagctgatagagattataggagaactaatgcccacatgccatagtcaccctgcagcattgttactgatggctcatcttaacttgttatactgataggcatgtaggcagtaacataaaattgatttatctttatcgtttagcaactttgggatatctggaaatgaactcaaatcaatatcttttgaatatcattatcttttgaaaagttataaatgggaaaacagtttaaaatattgactgtaataaagttctatgggttttacttctccatatttatccctattgcataccagtactaataatgattattgtagcacgctatcaactattaactgtgaggtttttgtttgttgttttggcttataggcaaaaaatatttacaaaatatatacaatttttattttaaaaaatcacacagtactatggtaatgaggcttaaaaccctctactgagtgtctactgggttccaggagctatactagacccttcacatgtattatcttatttaatctttattaaattaaattctttatttgtaaggcagggccagtaaaaccataaatattactggctctgctttacaaacagggaagcacatgttccaagaagttaaatgatattccaagataatattactgataagtgccagagccaaaattcaagccctagtctgtataactacaatatacacaatattcctatctgtagctttggattggaatttgtatgttacacaaatagagattctcttgcagtaaatacgcaggcctgctgtaactgtattttccaggttacattctagaaaacagaagtggtatcaaagtagttaaacatttcagaaaaagagttatctgctaaaataagtatgagaaagaaattaaactgatttttaaagacataaatttttaggatcttaatgttaatttcactgacaattacaaagatagagccctatggacaacttttcctaaacttcgatgactggagaactcttcaaccctttttgattcaaacctgtaataccatgtcatggaacattaatcctccttggaagatgctgttccagaccagagatatccaaactttttggacaaatgtcccttttaggaaagatatttgagcttctactctaatacagatatatttatctttaaatgtagattatttagttatgtaaattgtaaacataaataaaataagaaattgaaaagcatgagataaatattgaataaggaatattttcaaaaccttgctaattgctaaggctacttattattaggtattctcaaaaaagaaaatatatacttaagacaaaatacttctcttttgatagtggttttaagtacatattttacatttttatgcttttttaaaaaactgatctagctttttgtcaggtctgattacatgttgttatttttacctcatagtatggctacaagagtattccaggagtatgatgaatgtgttagtcttgccaattttttgtcattcatttgggcttgcatgataaatattatctttaatccacagtctctttgtaggaatcttccttaactacttcaattctgtgataattagttaggtaaactaggtaatataatgcatatacattccctcatatactgagttaacaaatgagttaaatgtcacccttcccccaggattcagaaatggaatattatacatgaccagggccagcttcatgggtaggcaacatgggtagtttcacaggtcctcacacttaaaagggccctgaaattggtttaatgtttgctgtcactgtcttgaaaatcttaaaattacattttgagacaggaactttacattttgtagtggaactttacattttgcattctctctaatccaagtttggctaacaaattaggtagctggtctttatcaaggggtcttatgaaggttctaatatcaatccaactattactcattattaaaattcaatttccttctcatttttagttaaaaacaaagataaatgaaaagctaacattttcctcccatgtccctaggtgtacacatagacactggggatcagtgctctcaatgaaattaagggtttgctctcttgggtaggatagaggatggaactgacggtttccttctagagtctagagtcaatcttcaaacagtaaaagctgaaaaaacttccatgctctgcaactttgtagaattaaattctgtaaagagtgtgttcaagaatgtctgttaataattttacccaatttagtagtcaaaatatgttataaacttcatacattattctgtttaaccagccatagcaaattgtcacagcttgggatggggatttaggggtggggcagggattagaaagaaggtttttgaagtcagagaactaaattccgaatacatctctgctaattgttggctctgtgactttgtttagttagcctctttgagctatgtctcttttgtaaaattgccctgttacacttttcacaaacttgttatcagtattaaataagagaaagtttgtaaatcaccaacatggtgcccagcaggcagtaaatgtccagtgagatttttctgattctctccttgctgaaaatcaggtactcggaagccctctttgatcttagttcccagaagttaggctctttactgttttttccctgtgatgacagacagaaaaatgaccaccccttgcctccagtccttacaaaccagcattgccttgcacaacagcagtttcttattttcttctcctgcactccagagtgattgcagtttctatgaggaatattcctgtcttagcacatactacagcagcaacttcagcaatatactgccactaaaaggcactgaggtgtatagcccttacccaggagaaagctttgatttctttcactcaaaaaacaatgcactgggcactgggtgcggtggcttatgcctgtaatcccagcactttgggaggccaaggtgggcggatcaccaggggtcaggagttcgagaccagcctgaccaacatggtgaaaccccgtctatactaaaaatacaaaatcagccaggcgtggtggcgcgtgcctgtaatcccagctacactggaggctgagacaggagaatcgcttgaaaccgggaggcagaggttgcagtgagccaagactgcgccattgcactccaacctgggcgacagagcgagactctgttgcaaacaacaacaacaacaaaaccaacaacaacacattgtagccccaggaaatttgaaaggcctttatgagagaactctctgtagtgagctaatatcctaagatacttttagtgcctcaaggaagtggaaatttactggtgtgaactcatataggggaagaaaaagaaaaaaagtcaacatattttggatgtccagttttttgtcgggcattttatgtatgttaaatcctttaaatcttacaatacaggatttatgacacacactcccacccccagatgaggaaattgtgcatcagaagagtttaattcttaaggtaatatggctctctagggcagaaactggaattaaacttttttcacaacagtatgctgctttcttggcaataacacataacggcagaaggaccttggaacctgtaggactgtctcacagagttcagcctgctctgctggcaaagtttacacctatcattctttccagtggagaagatgaaatcaggacagtcagaagtttcacatatcaaatgtgacttcacatatttttttaaatactagaactcataaatttaaatgatttccaaaaagattatattgtgtcaacatatttctgtcaataatgtaattcactgtgtcatgtatgtttgaaaacacactcttggaattacctcgagaagtaacttactagcaatttcagtagaaattttattgctttataacaacacttcaattcttaccaaaattgaattctataaactagatcatccacctcatttacaaaacttaacacctaatgacatttgaattttctttaaattacatctgcccttaaatggtaaaggttgactagctgtgagaattaaatgagactaagtcaacaaacacttattatacaactactatgtgcccggcactattataggtaatcagaatatagcagtgaatatgacagagttctgcctttataaaactgacgttccagtaatgagatgttcttggaaacattttgtaatccacaaagaaatagatattcctaataatgacaaacaatttctgaagacaatttcaatagaggagttccaaaaggttttgaggtacagtagcaatagatacgaatataacctctgaggctgatcacttttgagaatgttctatttaaatcattgtcaatttgaatatatgtcttaaacatttgatgatattcctttaaagtcagatatgtttgttatgtgcaaatgagggtgatttgaaatatacttttttttttagctttaactacttttgataaggtccaaactcagagatgctagtaggttattgaattatattgaaaacatttaaaggatccaaatggtactgaatttagcccaaacattcagatgcaatggtaggagtccttgtccagcacctggatgtttgggtacttcaatgacccactgccttgtatttacaaatcaggaccagatacttgatcttaagcaggccacatatccaggtgactaacagatttattggttaaacatattttaaatgcgctgatgatgtatagatatgctgactcacagatttcaaaagtaaatttagcatttgtattccaacagtcattctaacaagaaaactgtaagagaatttaccaattaggtctaacaggaaaaaaactcataaacaaatttatgtaatataattttctacttcttatgataacagcaagaaagaatatattaatacttggtgtttagtgacaagtgttagaaaaaaacttgaagcttcaagagaccacaggaatttagaaagcctcctatttgaaatggtagaaaatcatatctatactatgataaattctgtgtctgtaacttagctatttatttgatgaattcagtactgcttttagctttaacaatataactccctttatgaaactcttcatcaatatatttgtttaaccactctgtctttggtgtctaggcacagtatatctttttacaccagtgcattctggatctcttatcaaataagggaagtaatcagcccatctgttttgttaactattcagcacttcagaagatggactctttggacgccatggaaggtaaacagaaacaacagtatatgcccagcttactagtttaccacctacggtaagaacataaatttcagaataaccatatgttaaaaatgtttaagaagctggattagtgcacagatcaggttttttttctttaacttttctctaatccaagttgggctaataataccctttctgtctacattatatttttatcatgaaacatttcaattttgaactgttaacttcaacactctcttgtaacatgttactttctgttataggtgatgttgagcttgaatgggaagaaaccactatgtaaatattcagaccaaaggatacaattggaagagatttttaaatcccaggggccaaagttaccccctcattcttccgaattgaaatgtgcaaccttaaagaaatatctatgcttctctcactgtgcctttccaaacggattgaacattttaagactagttcttgaaaatagctaatacagaataattatttgttttgtacagaataaatattatgcattttaaatgcttaagaaaagacatcccatatgtttttgaagtcctccatattttggaataagccaaatagaaaattattattatattagcattaatgtttcaatgtg

SEQ ID NO: 93523 - DNA, 12665 bp, Homo sapiens
gtcagatgagtaggttgcgaaaaattttctcccgttttgtaggtggcctgttcactctgatggtggtttcttttgctgtgcagaagctctttagtttaattagatcccatttgtcaattttgtcttttgttgccattgcttttggtgttttagacatgaagtccttgcccatgcctatgtcctgaatggtaatgcctaagttttcttctaaggtttttatggttttaggtctaacatttaagtctttaatccatcttgaattgatttttgtataaggtgtaaggaagggatccagtttcagcgttctacatatggctagccagttttcccggcaccatttattaaatagggaatcctttccccattgcttgtttttctcaggtttgtcaaagatcagatagttgtagatatgcggcgttatttctgagggctctgttctgttccattgatctatatctctgttttggtaccagtaccatgctgttttggttactgtagccttgtagtatagtttgaagtcaggtagtgtgatgcctccagctttgttcttttggcttaggattgacttggcgatgcgggctcttttttggttccatatgaactttaaagtagttttttccaattctgtgaagaaaggcattggtagcttgatggggatggcattgaatctgtaaattaccttgggcagtatggccattttcacgatattgattcttcctacccatgggcatggaatgttcttccatttgtttgtatcctcttttatttccttgatcagtggtttgcagttctccttgaagaggtccttcacatcccttgtaagttggattcctaggtattttattctctttgaagcaattgtgaatgggagttcactcatgatttggctctctgtttgtctgttgctggtgtataagaatgcttgtgatttttgtacattgattttgtatcctgagactttgctgaagttgcttatcagcttaaggagattttgggctgagacaatggggttttctagatatacaatcatgtcgtctgcaaacagggacaagttgacttcctcttttcctaattgaataccctttatttccttctcctgcctaattgcccaggccagaacttccaacactatgttgaataggagtggtgagagagggcatccctgtcttgtgccagttttcaaagggaatgcttccagtttttgcccattcagtatgatattggctgtgggtttgtcatagatagctcttattattttgaaatacgtcccatcaatacctaatttattgagagtttttagcatgaagggttgttgaattttgtcaaaggctttttctgcatctattgagataatcatgtggtttttgtctttggctctgtttatatgctggattacatttattgatttgtgtatattgaaccagccttgcatcccagggatgaagcccacttgatcatggtggataagctttttgatgtgctgctggattcattttgccagtattttattgagaatttttgcatcaatgttcatcaaggatattggtctaaaattctcttttttggttgtgtctctgcccggctttggtatcagaatgatgctggcctcataaaatgagttagggaggattccctctttttctattgattggaatagtttcagaaggaatggtaccagttcctccttgtacctctggtagaattcagctgtgaatccatctggtcctggactctttttggttggtaagctattgattattgccacaatttcagcttctgttattggtctattcagagattcaacttcttcctggtttagtcttgggagagtgtatgtgtcgaggaatttatccatttcttctagattttctagtttatttgcgtagaggtgtttgtagtattctctgatggtagtttgtatttctgtgggatcggtggtgatatcccctttatcattttttattgcgtctattcttctctctttttttcttcattagtcttgctagcggtctatcaattttgttgatcctttcaaaaaaccagctcctggattcatggatcttttgaagggttttttgtgtctctatttccttcagttctgctctgattttagttatttcttgccttctgctagcttttgaatgtgtttgctcttgcgtttctagttcttttaactgtgatgttagggtgtcaattttggatctttcctgctttctcttgtgggcatttagtcctataaatttccctctacacactgctttgaatgcgtcccagagattctggtatgttgtgtctttgttctcgttggtttcaaagaacatctttatttctgccttcattttgttatgtacccagtagtcattcaggagcaggttgttcagtttccatgtagttgagcggttttgagtgagattcttaatcctgagttctagtttgattgcactgtggtctgagagatcgtttgttataatctctgttcttttacgtttgctgaggagagctttacttccaagtatgtgttaaattttggaataggtgtggtgtggtgctgaaaaaaatgtatattctgttgatttggggtggagagttctgtagatgtctattaggtccacttggtgcagagctgagttcaattcctgggtatccttgttgactttctgtctcgtggatctgtctaatgttgacagtggggtgttaaagtctcccattattaatgtgtgggagtctaagtctctttgtaggtcactcaggacttgctttatgaatcttggtgctcctgtattgagtgcatgtatatttaggatagttagctcttcttgttgaattgatccctttaccattatgtaatggccttctttgtctcttttgatctttgttggtttaaagtctgttttatcagagactaggattgcaacgtctgcctttttttgttttccatttgcttggtagatcttcctccatccttttattgtgagcctatgtgtgtctctgcacatgagatgggtttcctgaatacagcacactgatgggtcttgactctttatccaatttgccagtctgtgtcttttaattggagcatttaatccatttacatttaaagttaatattgttatgtgtgaatttgatcctgtcattatgatgttagctggttattttgctcgttagttgatgcagtttcttcctagtcttgatggtctttacattttggcatgattttgcagcagctggtaccagttgttcctttccatgtttagtgcttccttcaggagctcttttagggcaggcctggtggtgagaaaatctctcagcatttgcttgtctataaagtattttatttctccttcacttatgaagcttagtttggctggatatgaaattctgggttgaaaattcttttctttaagaatgttgaatattggcccccactctcttctggcttgtagggtttctgccgacagatccgctgttagtctgatgggcttccctttgagggtaacccgacatttctctctggctacccttaacattttttccttcatttcaactttggtgaatctgacaattatgtgtcttggagttgctcttctcgaggagtatctttgtggcgttctctgtatttcctgaatctgaacgttggcctgccttgctagattggggaagttctcctagataatatcctgcagagtgttttccaacttggttccattctccccatcactttcaggcacaccaatcagacgtagatttggtcttttcacatagtcctatatttcttggaggctttgctcatttcttttgattcttttttctctaaacttcccttcttgcttcatttcattcatttcatcttccatcgctgataccctttcttccagttgatcgcatcggctcctgaggcttctgcattcttcacgtagttctcgagccttggttttcaactccatcagctcctttaagcacttctctgtattggttattctagttatacattcttctaaatttttttcaaagttttcaacttctttgcctttggtttgaatgtcctcccgtagctcagagtaatttgatcgtttgaagccttcttctctcagctcgtcaaagtcattctccatccagctttgttctgttgctggtgaggtactgagttcctttggaggaggagaggcgctctgctttttagagtttccagtttttctgttctgttttttccccatctttgtggttttatctacttttggtctttgatgatgatgatgtacagatgggtttttggtgtggatgtcctttctgtttgttagttttccttctaacagacaggaccctcagctgcaggtctgttggaataccctgccgtgtgaggtgtcagtgtgcccctgctggggggtgcctcccagttaggctgctcaggggtcagggacccacttgaggaggcagtctgcccgttctcagatctccagctgcgtgctgggagaaccactgctctcttcaaagctgtcagacagagacatttaagtctgcagaggttactgctgtctttttgtttgtctgtgccctgcccccagaggtggagcctacagaggcaggctggcctccttgaactgtggtgggctccacccagtttgagcttcctggctgctttgtttacctaatcaagcctgggcaatgacgggcgcccctcccccagcctcgctgccgccttgcagtttgatctcagactgctgtgctagcaatcagcgagactccgtgggcgtgggaccctccaagccaggtgtgggatataatctcgtggtgcggcgttttttaagcccgtcggaaaagcgcagtattcgggtgggagtgacccgattttccaggtgccatcagtcacccctttctttgactcggaaagggaactccctgaccccttgcgcttcccaagtgaggcaatgccttgccctgcttcggctcgcgcacggtgcgcgcacccactgacctgcgcccactgtgtggcgctccctagtgagatgaacccggtacctcagatggaaatgcagaaatcaccgttttctgcgttgctcatgctgtgagctgtagaccagagctcttcctatttggccatcttggctcctcccccccggtattagttctttaaacttttagtagaattcagcagtgaagatattggggtctggggctttttttttttttttaactgggagagtttttgttacggctttgatctcattacttgtctttggtctgttcaggttttggatttcttcatggttcaatctaggtaagttgcatgtgtctaggaatttactcatttttttctagattttctaatttattggcatataattgttcatagcagccactaatgatcctttgaattgctgtgttatcagttgtaatatctctatttttatctttgattttatttatttgggtcttctctcttttttttcttaattagtctggctaaagatttgtcaattttgtttatcttttcaaaaattcaccttttttttcactgatcttttgtcttgttttcttcatttcaaagtaatttattactgttttgatcattattatttcttttcttctcctagctttaagtttgatttgctcttgctttcccagttctttaagatgcatccttaggttatttatttgatgttctgattttcttttttgatgtaggcacatacagctccctcctagtactactcctgctatatctcatatgttttgatatgttgtgtttccattattatttgtttcaagaaaatgttcaatttccttctcaatttcttcattggcccactgatcaatttaggagcatagtttttaattttcmtgtgtttgtatagtttccaaaattcttgattgatttttagttttattccattgtgatcagggaaatacttgatatttcaatttttcgaatgttttaagactttgttttttttactttgcagatgcagctgccactgggagccctgtgccttagccatggtcaacccaccatgttctttgacatcgccatcaayggtaagcctttgggccawgtctgctttgagttgcttgcagacaagtttctgaagacagcagaaaactttcatgctctgagcactggagagaaaggatttggttataatggttcttgccttcacagaattattccagggtttatgtgtcagggtttatgtgtcacttatttctacataccataatggccctggtggcaagttcatctacggggagaaatttgatgatgaaaacttcatcctaaagcacacaggtcctggcatcttgtccatggaaaatgctgaacccaacacacatggttcccagtttttcatctgccctgccaagactgagtggttggatggcaagcatgtggtctttggcaaggtgaaagaaggcatgactattgtagaggccatggagcactttgggtccaggaatggctagaccagcaagaagattaccattgctgactgtggacaattctaataagtttgacttgtgttttatcttaaccaccagaccattccttctgtagcttaggagagcactcctccaccgcatttgctcacagtatcctataatttgtgtgctctcactgcagttccctttgggttccatgttcccttccatgcctagctggattgcagagttaagtttatggttatgaaataaaaactaaataacaacaaaaaagacttttttttacctaacatatagtctattcttaagaatgatccatgtgctgcggaaaagaatgtgtattttgcagccactggataaaatgttctgaaaatatctgttagattaatttggtctgtagtatagagtacgtctgatgtttctttgctgatttgctgtctgggagatctgtccaaagctgtaagtggggtgttgaagtctccagccattattgtattggggtttatctctctctttagctctaataatatttgctttatatatcatgtgctttagtagtgggtgcatatatatttacaatcattatatccacttgctgaattgactcctttattattataaagtgacctccttgtctcttacagcttttgtcttgaaatctattttgtctgaaataaggatagctacttctgctcttttttggtttccattggcatgaaatatctttttttatctctttttttcagtctatatgtgtccttataagtgaactctatttcttattggcaacagatcatttaatcttattttttttaatccattcagtcactctatgtcttttgattggagagtttagtgcatttacattcaatattattgactactagggacttctttctactattttaaaatttgttttctggttcttttgtggtcctatccttctttatttccttcttgtctttcttagtgaacatgattttctctggtagtattctttaatttcttgctttttactttttgtgtatccattgtatgtttttagatttgaggttacgatgagccttgcaaatactatcttataacttatcattttaaactgatgacaacactgattgcatatacaaacaagtatgcagaaagaaaactaaaaaaactctacactttgacttcatcccccactttttaacttgttgttgtttctctttatgtctgattgtactgcgtacatcttgaaaagtctttgtagtcattatttttgattggtttatcatttagtctttctagttaacaatggtaattaacactaccaatggcaatggtggttgttacttttgctggattctttttaattattttaatctctttgttaaatgtatctgatagaattaatgtaatcactaattctatcattaattaatcattaacaaatcatttattattaataaatctaattaattctatgaattctgaatttcttctctgtgttatcttgaattttcttgagtttcctcaaaatagctatttattcagttttctcaaaatagctattttgaattatctgtctgaaggatcatatatctctgatcctctggggttggtccctggtgccttatttagttcatttggtgagatgttttcctgaatagtgttaatgcttgtagatgttcatcagtgtctggacattaaagagttaggtatttactgtagttttcacagtctgtgcttgtttgtacctgtccttggaaagactttctaggtattcaaaagaacataggccccaagcctaatactgctgtagtttttttagactcatggaagcaccactctggtggttttgaataagatctggaagaactattttgattacccgcagactcttgttcttttcccttggtttctcccaaataaatggaggctctgtgtgtgtgtgtgtgtgtgtgtgtgtgtgtgctgagatacctggagctggggatgtggtgatgcaagcacccctgtggccagcaccacggggaccatgctgggtcagacctaaagtcagcacaacactgagtcttgcccaagtccattcccttcagggtggcaagttcttccagtcaccaggcatgtccggagatgctgtctgggagccaggaattgaagtcaaacaccttagcagtttacttaatgttatattctgctgcaactaagctgacactcacaccacaatacagagtccttcccactcttccctcccctttactcaggcagaggagcctctccctgtggtcaccaccaccaccagtccatgggggttctgccaggccaccgttgatgttcacttaaatcccaagggctcttttgtaagcttgtggtgaatgctggtaggcctggagcttacccttcagggaagtgggctctcttctggccaaaggtagttctagaaattctgtccaggaacttagggctggacttagggattccaagagccttcttgttgctttgccctactgtggtcaaactggtgttaaagatacaagacaatgttccctttatttttacctgtacttttctcaaacaggagtctttcatcatagccaccacagctggaaaagtgcttggtaaactctgagctagcatgtctcagatcccaaggcccatgatgtgctttctgggtatttctgctggttattcagcacccaagggttcttgagtcagcaggtgctttagtccattctcacaccattatagagaactacctgaggctgggtaatttatgaagaaaagatgtttaattgactcacagttccacaggctgaacaagaaatatggctgggaggcctcaggaaacttataatcatggcagaaggcttagggaaagaagcacgtcttaccatggcagagtaggagagagaaagtgagggagaagtgctacatacctttaaacaaccagatctcacaagaactcactatcacaagaacagcaaggaagaaatatgcccccatgatccaatcacctcccactaggtccctcccccaacattgggaattacaatcctacatgtgatttgggtgagacatagagccatatcattcatcacaggtaatgaattctgccaggaatggtccttcccttcaaggaagcagttcccttttagcccagggtgtgtctgggaatgttgttcaagacctagggcctcatgactctgtttgctgccccatcctaccatgtctgagctggttcctaagatgcaagactttgttacttttcactttcctctccttaagcagaaggaaggtgtcacatttgttgctgcaagctgcattgattggggttcagggagagattgtgcaaacactgccttagccacaccagctggtgtctccctaggtcatgtgctagtccactggttctaagcacagcctagtactagaagttgcctagaaattgcactcctggtatcctggactgcccttcaagtttacctaggaccccagaacacttcagyctgtggtggcgaggcttgctgagaaactcaagttctaactgctgggatgggcaattttcctctggctagggctggtccaaatgctccctccatgtgaaggtgctggctgagcccagtacagctttattctctactgtgacagggaaccactgagttcaatgtaaagttcctcagtcactgcactctccctccacaaattgcaaagttcctctctcttagctacacagctgctgctggggatgaaggagggggggtatcagtgattcaagactgtctctcctaccctcttcaatgtccctttttgtgatatgaaattaaaaccagatattatgattgctcacctgatttttggttcttgtgatggcaattttctgtgtgcagatagttgttaaactttgatgttccagcagagaactaactatgtagggtcctgttccgccagtttgctttgccccgttacaggtgtctttttgataaaatggtttattttcctttggacagatacccagtagtgagattgctagtttgaatattactgccatttttagtgcagaaatgtattttttaaaagtcacagatagtttcaacaaaactgatgactagattttaaggaaaagcatctgtagtaccttgaattctgaccctgctgcaatagtgctggggagtccgtcttcactaacatgggggctccaatcatctcccatccagtattatcataaatagctctgtagtgagaagggagactacatctcttaatcaaaatcaaagtgctttctctgtggattaaactaaccaaagggctacactatttattctcaagaaagtagaacttaatttatttgtgttaaagcaaagcattgaaaaacttttcatgtgttggccatttatttcctttgtgtattatgtgttggccatttgtatatcttcgctagtaaagtgtctagttaagtctgtacccattttattaaagggttgttcgtattttaaaaccgatttataggagttccttacatattctaaattaacattaatatattcatgttattaatactagcattaacaaaatagtatttaatataaaccaagttaatattctaaattataatttggcaaactatggcctccaagctaatgtgaccggcaatcttttttttaaataaaattttattaaaacacagtcatgctcatcaatctttacattgtctgtggttgattggtcttataactgaaatgttgagtagttacaacagagattgtgtggtccataaatcttgaaatacatacagtctgaatctatagaaatagtgttctgatccttgtcctagtttagcatcttaacaaaatagtatcttacaatctataaacacactatatcttttcatttagtaaatttttcttttagaggtttttgatagttttcagtgtagaggtattgactaccttttattaaatgtattactattttgtgttttcttgatactattttaaatggcagtgcttttagaatttcatttttctattgtttgttactaatgtctagaaatacaattgcttttttgtatgttgaccttgcattctaagaccttactaaatttatttttatttatttatttttgaaatgcagtctccctctgtcgcccaggctggagtgcagtggcacaatcgcggctcactgcaagctccacctcccaggttcacaccattctcctacctcagcctcctgagtagctgggactacaggcrcccgccaccacgcccggctaattttttttctacttttagtagagacggggtttcactgtgttagccaggatggtctcgatcttctgacctcatgatccacctgcctcggcctcccaaagtgctgggaattacaggcgtaagccaccgcgcccagctagaccttactaaatttatttacttgttttactagttgtttgtagattccattgcattttccatatgaaaaatggtgtttattaatagagacagctttacttgttccttttttaatctttaggcttcttgtgatttgctctttgccttctttcactaactaggacctccaatacagttgcttagaagttatgaatgtaaacatacttgtcttgtttctgattttcaagtgaaaaacttttcatgctttcccagtaagtataatgtaagggtattgtttctttgatgagaatttgttcttttaaagtaaggattgtgtgactttgttctttaatgtagtaaattatattgaattattttcaaatcttaaaccaacctcacattcttcaggtaaatactacttggtcatgttgtaataaaacacactggatttgatttgatagaaggattacgctgacctcataaaataaagtgtgaggtgttccttttgtattcttctaacgaatttgtgtaagatccatattatttcttcttcataaatgtttgatagaatttaccagtgaagctatgtgggcatgaagttttctttgtgggaaagctttaattatgacttccattatttttaatttaattttatttatttttatttttttgagatggagtctcactctgtcacccagactggagtgcagtggcacaatctcaactcactgcaacctctgcctcctgggttcaagggattctcctgcctcagcctcctgagtagttgggactacaggcacacaccactacgcctggctagtttttgtatttttaatagagacagggtttcaccatgttggccagggt

SEQ ID NO: 93524 - DNA, 12764 bp, Homo sapiens
aattttaaaatgtgttcttaggctctacacacgagaggatcaagaatagattataaaccgggcgcggtggctcacgcttgtaatccccagcactttgggaggccgaggcrggcggatcacgaggtcaggagatcgagaccatactggctaacacggtgaaaccccgtctctactaaaaatacaaaaaattagccgggcgtggtagcgggcgcctgtagtcccagctactcgggaggctgaggcaggagaatggcgtgaacccgggaggcgaagcttgcagtgagccgagatcgcgccactgcactccagcctgggcgacagagcgagactccgtctcaaaaaaaaaaaaaaaaaaaaaaaaaaattagccaggtgtggtggcgggcgcctgtagtcccaggtactcgggaggctgaggcaggagaatggtgtgaacccgggaggcggagcttgcagtgagctgaaatctccccactgcactccagcctgggcaacagagcaagacttgtcttaaaaaaaacaaaaaaaagaatagattataatgaataaagttctgctttcctctgtatttctcagaatttacccagaattctggtaggtgtaggaaacacatttgaaagacaaactagaaaatttccagagcagagtagtaatgaataagaaaaaaactgataaacttctgtcctgactaagatgataaggaatagagttaccatccctacctaaaatcaaacaaacaaacaaacaaacaaaaacctaaataaaatatatgaaacaacaactttctcttttttttttttttttttttttgagacggagtctccgtctgttgcccaggctggcgtgcagtggcgcagtctcggctcactgcaagctccgcctccctggttcacgccattctcctgcctcagcctctccgagtagctgggactacaggctcccgccaccacgcccggctaattttttgtatttttaatagagacagggtttcaccatggtctcgatctcctgacctcgtgatccgcccgcctcggcctcccagagtgctgggattacaagcgtgagccactgtgcccggcagaaacaacaactttcaagacatgagacatcaggcaagaaagacgtaattcctgctagacggaagacaggtcggattctctgattactctgggttaccgttttgagggagatgctaagttgtgattcagggaggataaagccagctggaacgtgtggattccctgagttgaggtaacagaactgagaatccagtgagaccaaggcagacagagttcacagaacaaagtactggaggggaaagtaatgaacagagaaggcactatggaggtctccagaggatctccttcaaatactcagcagagtctgatcagcgtatacatgtgatgagactgcttgatgttggaaaaagaaccacctaaaaggattagagaaaacagaacctagtgctcacactgggctgggaatagtgcctgttcccacaagccagactacaaaaccttataattcactgggcatgggtaaattcagagggtcttgactcagtagtaaggaataattagcccaagagaaaacactgcgctagttatgactaacatcttaaaagaaagtctagaaaaatgctgtctgtttttaagttacttaactgcatcccagaagaaagcgccagaatatttttaggaacacaaaaatatctagcacccaacaagtaaaattcacaatgtcaaagactagcaaagattatcaaagattaacaggcataaaataaaggaaaataggaaaaaaaatgaaaggattaattgaaacaggcccagaactgagagaaattggaaatatcaaaatagaacattaaaacagtcattataactgcatttaatagactttttaaaattatgtggaggcataatcaaactttttgagaggggaacattataatgtctttgataaaaatacaatacatgagattaatgacaaattacatattatataaagaaaagattggcaaacttgtagaaatagcaataggcactgtaagagaaggcacagaggctgggcacagtggctcatgtcttaatcccagcactttgggaggccgaggcgggtggatcaccggaggtcagaagtttaagaccagcctgaccaacatagtgaaaccccatctctactaaaaatacaaaattagccaggcttggtggcacgtgcctgtaatctcagctactcgggaggctgaggcgagagaatcgcatgaacccaggaagcagaggttgcagtgagtcaagatcgtgccattgcactccagcctgagcaacaagagcaaaaaactccatctcaaaaaaaaaaaaaaaaggccaggtgcagtggctcatgcctgtaatcccaacattttgggaggccaaggctggcagatcacaaggtcaggagatcaaaaccatcctggctaacacggtgaagtcccatctctactaaaaatacaaaaaattggccagccgtggtggtgggtgcctgtattcccagctactcaggaggctgaggcaggagaatggtgtgaacctgggaggcggagcttgcagagatcgcgccactgccctccagcctgggtgacagagcaagactctgtctcaaaaaaaaaaaaaaaaaaaaaagaaggcacagagagaaaaacaaaaggagcatcggtgagctgtgcagcaatttcaggtaacctagcttacatgtaattgaagtcctcgaatcagagagtaaaaaaaaaaaattgaagaaattaaaactgaaaatatttcaaacttgataagagcaataaacacacagattccaaacacatacaaaaatcttcaacaaaatagtaggtaaccaaatccatcagcatatcaaaaagataatccgccatgatcaagggggttttataccagggatgcagggatggtttaacatatagaagtcagtaaatgtgatataccacataaacagaattaaaaacaaaaatcacatgattatctcaatagatgcagaaaaagcatttgataaaatccagcaacctttgtgatcaaaaccctcagcaaaattggcatagaagggatataccttaaggtaataaaagtcacctacaacaaacccagagccatcattacactgaagggggaaacgatgaaagcatttctcctgagaaatggaacaagacaaggatgcccactttcaccacttctactcaacatagtactagaagtcctacccagagcaatcagacaaaagaaagaaataaaggacatccaaatcagtaaagaggaagtcaaactgttgctgtttgctgatgatatgatcatatacctagaaaaccctaaagacaggaggctgaggcaggacaatcacttgaacccaggaggcggaggtcgcagtgagccgagatcgcgccactgcactccagcctggagacagagcaagactccatcaaaagaaagaaaaagaaagaaagagagagagaaagagagaaagagaaaggaaaggaagggaaagggaaatggaaagggaaagggaaagggaaaggaaaggcaactctaaagactcatccaaaaaactcctagaactggtaagcgaattcagcaaagtttcagaatacaaaattaatgtacaaatcagtagctctgctatacaccaacagcaaccaagctgagaatcaaatcaagaactcaatccctttcacaatagctgcaaaaaataaaatcgaatacttaggaaaatacctaaccaaggaggtgaaagatctctacaaggaaaactacaaaacactgctgaaagaaatcataggcacaaacaaatggaaatacatcccatgctcttggacaggtagaatcaatattgtgaaaatgaccatactgccaaaaacaatctacaaattcaatacaattcccttcaaaataccattgtcattcttcacagaaatagaaaaaaaatcctaaaattcatatgtaaccaaaaaagagcccatatagccaaagcaagactaaacaaaaagaacaaatctggaggcatcacattacccgatttcaaactattataaggccataatcaccaaaacagcgtggtactgttataaaaataggcacacagatcaatggaacagaatagagaacccagaaataaacatttacggctaactgagcttcaacaaggcaaacaaaaacataaagtggggaaaggtcaccctattcaacaaatggtgctgggataattggctagccatatgtagaagaatgaaaccggatcctcatctcttaccttatacaaaaatcaactcaggatggatcaaagacttaaatctaggacctgaaaccataaagattctaaaagataacatcggaaaaccctcctagacgttggcttaggtaaagacttcatgaccaacaacccaaaaggaaatgcaacaaaaacaaagataaataggtgggacttaattaaactaaaaagcttctgcacagcaaaagaaataatcagcagagttaacagacaacccacagagtgggagaaaatcttcacaatctatacatctgacaaaagactaatatccagaatctacaaagaactcaaagaaatcagcaagaagaaaaaacagacaatcccatcaaaaagtgggctgacataaacagacaattctcaaaagaagatatacaaatggtcaacaagtattaacatatggaaaaatgctcaacatcactaattatcagggaaatgcaaatcaaaaccacaatgcaataccacctcactcccttaagaatgaccataatcaaaaaatcaaaaaataatagatgttggcatggacgtggtgaaaaggaaacagttttacactgttggtgggaacataaactagtacaaccactatggaaaacagtgtggagattccttaaagaactaaaagtagatctaccatttgatccagtaatcccactactatatgtctacccagaggaaaagaagtcattatacaaaaaagatacttgctcacgcatgtttatagcagcacaatttgcaattgcaaaaaatgtggaaccagcccaaatgcccatcaatgagtatttaaagaaaatgtgatatgtatagagatagagatagaaatataccatggtatactactcagccataaaaaggaacgaaataatggcattcacagcaacttggatggaattggagactattattctaagtgaagtaactcgggaatggaaaaccaaacagcttatgttctcactcacatgtgggtgctaagctatgaggacccaaaggcataagaatgatacattggactttaaggtctcgggggaaaaaatgaggggtggcaagggataaaagactatacattgggtactgtgtacactgcttgggtgatgggtgcaccaatatttcagacatcatcactaaagaatttattcatgtaaccaaacaccacccgttccctcaaaacctattaaaaaataaaaaataaaataaatataaataaataaaacataggaaaccaaacctaacacaactgtaaaaagaaatgcacaaatccacaactatagttggagattaaaattcacctctctcaatatttgatagaacaagtagacagaaaattatctaaaacatggaatacttgaacaatacgatcaactaagttgacctaattgacatttatagaagaatccacccaacaacagtagaatacacattcttctcatgtgcatgtgaaatattcatgtgtgtgtgtgaaacatagaccatattctgggacataaaaccagtctaaataaatttaaaagaatttaggtcatacaaagtctattctgtgactacagaggaataaaatttttaaaatgaataacatagaaatctctagaaaccaaacaacacacatctatataacccaaatattaaagaattcaaaaggtaaattggctctggttggagtcacagggatgctaagaccactgcctgggccttcgctgaccatgctgtcccaggtggcacattctgccaccaccatggtggccccctctctgaagaatacagccttcataggtccagggatattgcaggcaacaaagacctttcacacagggcagccacaccttgcccttctaccacctcttcctgaatatggagggaaagttcatttggggctgatccctgaggaattcttccagtttctttatcctaaaactggtgtaacaggaccctatgtgctcagaactgggcttatcttgtatggtttatccaaagaaatatatatgattaccccagagaccttctctaccacatcgatagtatggttacttgtctaaataattttaaaatatcgcgcctctattggagattttgctgaaaaattcaatgagcaaaaaattgcccaactagaagaggtgaagcaggcttctatcagacaaatccaggatgcaactgatttggagaagtcacagcaggcactcgttcagaagcaccattacctktttgatgtgcagaaaaacaacattgctatggctttggaggttactgggaacractgcatagactatataaggaagtaaagaatcacctggactatcatataactgtgcagaacatgatgcttcgaaagaaacaagaacayatgataaattgggtggagaagcacgtggtgcagagcatctctgcacagcaggaaaaggagacaattgccaagtgcattgccaacctaaagctgctggcaaagaaggctcaagcacagccagttatgtaaatgcatctatcccaattgagacaactagaaacagttgattgactaaatggaaaccagtctatgtgacaaaatctttctgtattgtagtatttttgtatcctgtattctgtatttttaggagacgtaaactataacttcagtagaagtttcctctcctaaaaatgaaaagtttgtttcatatagtgagagaactaaatctattggccagtcagatggctctcatccttcttactctgcatttcagttgttccgtgatcacttttgaataagcgtttgcctttattaaaacttgctgcctgactcaagattaccaagttataatttaaacttgtaattaattataccatcttgcaatatagtgataattgaatgaaaaaatggcaaattgaattggaaagtattttaaactgaatgaaaatgagacggcaacatacctaaattcgtagaataccacaaaaatcattttaaatggggagacttacagcactacatgactgtattagaaaataaggtctcaaatcaatgaactcagcttcaactatgagaaaagagaacagggcttggcaaactacagcccttcgatcaaaccaagatcactgctcatttttagagataaaattttattggcacagtcttgcacattcttttacatcctagaggggcatacacacttcagtggcagagttgagtggttgtacaaagactgtatggctcacaaagctaaaatattgccatgtcatcctctgcataagaagtttactcacccctgaactggaaaaagaagtgcaaattaaacccaaaaactatggaagaaactaaataaggattacaacagagttcagtgtaatttagaaaatacagaatgaatacagaaaagctttggttcattgagaaaaatatatgaaagtgatactaatcagaaaaacagaaattatcaatatgagaaatgatagagacctccctacagaaactacatataataaaagaaaaatatgggccaggtgcagtggctcatgcctgtaatcccagcactttgggaggccgaagcaggcggatcacgaggtcaagagatcgagaccatcctggccaacatggtgaaactctactaaaaatacaaaaattagctgggcatgctggtgtacacctgtagtcccagctactcgggaggttgaggcaggagaatagcttgaacctgggaggcagaagttgcagtgagccaagatcatgccattgcactccagcctgggcaacagagcgagacttcgtctcaaaaaaacaagcaaacaaacaaacaaataataaatggaaaatatgaaaataatatgaacttcctgctaataaattcaacaacttagatggaataaacaaatttctccaaagacataaatgaccaaaactcactgaactaagtaatctgaacaattctatatttattaaagaaaatcaatgtgtaactaaaaaatcttctcacaaagaaaatcccatgccaacatgtctttccaaaatttaaggaagaaataatatgtattgttacatgaactcttccaaaaaaattgaagagtttgaattctccccatctcaatgtataaagttaccattaccttgataccaaaaccaggcaaagacattaacacaagaaaatcctataccaatatccctcatgaataaaaatgcaatttttttaatttgacaaatcaaatccaacaatacataaaaatgataatacatcatgaaagagtgggatttatctcatgaaaacagtgttggtaaacaattttggcttagcatttgaaaatcaatcaacttaatttatcttattaatacactaaaaaataaaatccatgtgattatcacagtagaagcataaaaagcatttgacaaaatccaacataaatttctgataaaaactctcagcaaaataggaatataagaaaactttatcaacttcataaaagacatgatgaaaaactacagctaacatggtacttaataatgaaagattggttattttccccttaagaccagaaaaaatgcaaagatatctgaacttatatctagttaacattgtagtgaaggttccagctagtgaaatagggagagaaaaaggaataaaaggtatccagatttgaatagaagaagtaaaactctattgtgaaacaacattgtgcaaaaataacccaggaaacctacaaaaaaccctgctagacctaatagtgaatttctcaagtatctttagtttgttcagcatgctgtaacaaaataccataaactaggtagcttataaacaatagaaatttatttctcacagatctggatgttgggaagtccaagatcaaggaaccaacagattcttacagaaatatatgtaaccaagctaaatccatgatctctgttgtccagtgtgagattggtgcagtaatcagggtacagtctagctaacaaaaagtaacataagaatagttcaatttcctcccttgagttttctgaatgccatgaattgtatagtctccagcgaggcttctcaaaatttccattttccttccaacacttttgtcatactatgttggttttgggccacattttacggaaatgtcttcccctggcccatctgcttgttatcctttttcttgtcattcctgattctgcatcacaaaaggctaagcaaatagtctggcaacagcagatctgtccatgggagtcaaagaaaggggtaagtctgagtgggcaacagtagaattctttgaccaattcaaggatgaggaaaacctgggaacattcatgcattgaaaggaagaacactgatgtgcttaaaagcacaggctctagagctagaattctaggatcctgtgtcaggctccgttatttaccagctgggcgacattgataagtttatctaacctttccgagcttcatttgtcttatctgtaaaatggagataataatcataacttcctaagatgactctttgagcattaaacgatttaatacatgtgaggtacttagaattacacgtggcacatatgaggctctctaagctagtacttaattgctattcatatgtatagtaataacttcggcactttcaaacataggtactttttgagacccaaaatgraatgggcagtctcaagagatagtgatctccctatttctagaagtgaccaaactgatattagaggaatgctccatcaagaaagtacacatcacattcattaatttgatactgattggaccaggactgcatagagtccctttcatatataagggtctatatttctgtgcatcttttctgccttggttattttcttcctgtttccaccattcatccaccccagatcagagaatttgaattctcttaatcctaggcattttttttttctttcgcttgaaggtgttttgtaaaaaaaagctttctttcagataacaaaactgacaattcacaaaatagggaaataaaaatatgttaacctcacaggaaatcaaatatttgataatacaaagaatgtccctgccttgtgtacacacaagattgtaagcactgagaattttgtaaaaaaatatataatgtttttagccaactgacacccacacaaaacaagtctttctgcaagatggataaaacagaaaaacgaattcgaagttaatattttctaagtagagaatttacaggtattccactataaaatatgtttctctgttttcttctttttctacttcttttgcattcagggaaattctaataaacagttcagctttttatcctggtggtcaaaggaaaatgtattttctaatcaaaggaaaatcaatgacaattatcagagttttttcccacatctaaccttatctcctttactctacgtccccaaatggtggggtattctttcagttaaaggccaccaccaccttctttgagaacttgcccccctcttcctatacctttaaccttcctctcctttctgactttcccacttcaacctgcaaatattcccacatgcttcacattcactacaaaccctcctttgaccttggatccacctcctgctaccaaccagtctatcacttctgcatctctattcatacagaatatctctctcctcttccctctcactctgcagacatttactcctccttttagaatcattccatagttgtaacaccatccatctcccaccccccaataagagtagtaaacatccctcattgcctcacagaattaccccaaataccctattggtgttatcagtttacctcaacagccttgaaagtagacctaggaggcttggccgacaaagaaagagatatacattgattccttagggaataaatgaatgcaccagttctagacaaacacatatgaaaaagaactaatatgattatgtgttataaccttgataggtacattttgttgttgaaacttaaaatttttcagatgaataaggccaagtcagtaatctctttggccctgaattctgtgtaggcaaaaatgtgtaaactcccacatggaaatactagccatagtctcggtgccctccaatcagtaatacaattgataacacatatttttccctgggccatttggtctaatctttctatgatctacataacttctcttgactttttcattctagagtctatactctagatattccatacacagaccagcacactgccatgggcatccctggactgtcacttagtctttctatctatgcgtactgttttacccactgtcacaaaacttcagacacagaacagtctggagaggtaagctctgtttatccaagatcacatattttgttgattttttttttagttggggattttttgaaagtttaaaattttttattttgtatatcttatttatttatttgtttatttatttggagtgcagtggcgccatctcagctcactgcaacctctgcctcctgagttcaagcaattcccctgccttagcctcttgagtagctggtgcacaccaccatgcccagctaatttttttttattttagtagagacggggtttcactatattggccaggatggttttgatctcctgacctcgttatccacctgccttggcctcccaaagtgctgggagtacaggcgtaagccactgtgcccggcctgtatatcttatttttttaagccacccttcattgagacttattgtgggatagaactagaacatgagcttggcttacattttctcattcagactttaccacaatcctatcaagttcacactacgattataaatttcatccccattttacaattgagaaaactgaggtataaggaaattaagaaagttaatctaaaccacatagctggtaaggtcttgagtcagaacagctgtttccaaagcagacactcttaaccaatactctacaatgtctcatggaaaatccgagaatagatattcagaggaaaaactgatgatagatactcatgtgtatttaaaaagagaatgaggcctgggaatatatttccttattatttatagagtgtgtaagtttttaaaaatgtagaataataacatagggaacagaagaaaagaaaaataccctaaagatttctaaaagaacattttgaccgaaagaggcttttctaagcaagtagtttactcctgggccattagtcatggatttagattttcttttgagctattgattagcaagtgaaatgcaatttacagattttgttaatcattgttctcttggtgagcaaatttttcaatctgtttcaaaaacagtcaagtaatagaactaaaaaaccccaagccaagttggatgggagagaagagtactcaaacatttgcactgacatcattgtttacctagtggagaccctcctaacattctaggaagaataactccttcaggaagggtttctgttctcagaaaaacattccacaaacctttataattaagaaggaaatgcaaggcccaagagacttttccttatcagcaaagtcatcctaaatgtatataaatttattc
